United States Patent Application Publication US 2026/0191916 A1 - sequence listing, part 57

SEQ ID NO: 273 - DNA, 4373401 bp, Lactonifactor FBI02339 (residues 2,186,702-4,373,401 of 4,373,401)
  source 1..4373401: mol_type = genomic DNA
acgggaaaccaactcatcctgcttacgcttgtgcaatatggcctgagtatgggagctggaatcctgctgggaatgctggcggcatttccggcagtcaggatggttggaagaatgaccgttaccaccacagggatcctccttccggatgatttaccggttctcccatgcttaggggcgttcacagttatcctgcttatattggtgggatttacggttctgaaactaagaaacatcctcctggttacacccatggcggcaatccagggtgaagcgtcagaggtgaaatggaatccgggcaggaaatttcaaatgagggcggaagcgcttcccttacggttggctgtgcgccagctcctgtccgggaagaaacggtatgcaagcgccttcctgattgcggttcttcttgtattctttgcatcgctggcaggaaagatgaatgcctggcttggcccggagggaaaagggatgatggacgcttttaaccctgcagacctggacatcggcgtacaggccctgggagaactggaagccggggaattggaggaaacagtgcgttcttatacagacattacggatgaatatcttcttgccatgcccagtgtatcggtaaacggaagcaactatacggcaaacgtaattacagagccggaaaggtttcatatcagcaaaggggagaccagcagaggggcagatgaggtagtcctcaccgaaacaattagctctgatttaggggtatctatcggagaaaaggtgaccatccggggcgatatggggagcggggaatttaccgtttccggaatataccactgcgccaatgacatgggtgccaatatcgggatgaaccgggagggatatcttaccatcggaaaggatgacccgcagatctggtgccgtcactatttcctcgccgacacgtcaacaaaagcggtaatcacagaaaggctggaagaaacttatggaggtgatgtacatgtacatgaaaatacctggccgggacttttgggaatcatttcggccatgcacggactgattgcatttatgtatgggatgatcgcagtatttatcctgattgtaacagccatgaccggaagccgtattctgacggcggaacaaaaggatctgggcatctacaaagccattggatgttccacaaggatgctgcgcatctccttttccctccggtttgggattgtagcggcgataggggccgcagtgggaaccatactggcagccatgattacagaccccatggtatccgctgtcatgcggcttgcggggattagtaattttacatcccaaccgacaatcacaaatatggtcataccggggttgacagtcaccctcctgtttcttggcttctcatatctgtctgcaggaaggatgaaaaggtcggacatgacgatattgacagcggactagagtgtgtttcaaatatgctctggtacacggaggaatttacatagttagcatagcgcaaaagcgcagaaaggacaaagtatgaagaacaaaatagtaaaaaaagtaacaggaatggcagccatgatgatgttatcagcagcgttccttgtaggctgtgagcaggaggaagtacctcagagtgatatagatgcaggagatgttgcagaggcagaatctgactcagaatcggaaaccatggcagacagtcaggcagtaagcaatgtatccgaactggaggtacggttcggggatgacggagaaccttttatgatgcaaatggaggataacgagacagcagcggcgattgtccgctatgtgggaacttcggattggaggttaccaatttatgagagggatgaagatgcggactatgatgtaatgcagtattatgatgtatccagcagatatgacattccctctaaccctgaaacagtaacatcggaaaaggcaggagaagtttactattcagacccgaaccgtatcgtgctcttctaccatgacgcagagattaccggggaatataccaaaataggaacttttgatgcaacagaggaatttgtgactgcagtggaggagaacccggtattagaaggatgggacaacaaaatcgtgcagattgcaagaccataaaatatgtgttgacaacctgagaacaaacagaaagaaaccgaagcagaagtagaaaatgtataataaaagaggagattaactatgagtgaaatgaaagaaatcagacaggaatatttaacaggggaacgcccgcttttcaaaggtgaaaatttaaaaataaatgataccatatttgcagaaggagaatctccgctgaaagaaagcagcaatgttgaactgtatggaagcatgtttaaatggaaatatccgctttggtacgcaaaaaacattttggcctgtaactgtacctggtttgaaatggggcgcgccggagtgtggtatacagataacattacagtaaaaaatgcagtcattgaagcgccaaagaatttccggcggtgtcatggcgtcacacttcagaatgtacattttcacaatgccgcagaaacactttggaactgtgacggggtaacgatgaagcaggtgacagcaaaaggtgattactttgccatgaacagtcggaatatgaagttgacggattttgaactggtggggaattactcctttgacggagtgaaaaatatggaaatccgtaatgcaaagatgatctccaaagatgctttctggaacagtgagaacgtgacggtatatgattctttcatatcaggggaatacctcggctggaatgcaaagaatctgacactgatcaactgtaccatcgagagtctgcagggaatgtgctatattgagaaccttgtcatgaaaaactgccgtctgctgaacaccacacttgcttttgaatattctacagtggacgtggaggttaagggtaagattgacagtgtaatgaatccgtccggaggaacgattcaggcagactacattgaagaattgattatcgaaaaagacaaggtagaccctgataagacagttatcacctgtcaaatggacggcagtacagaaaaaatggcaggataacagatgggtttatttttaataaagggaatcctcatcggccttctcttcggcgtgccggccggggcggttggggcaatgacagcacagagaaccttgaattacggtgtaaaagcaggtcttataaccggtatggggtcctctgccgccgactgcctttatgcttgtgtcggagcatttggcttcactcttatttcagactttctgctaaaataccaaaacaacattaatctggccggggggtgtctgattttgggaatgggtatacggatgcttataatgaaaagcagtaaggcgaaagatacaccggattctaccaatggaatccagatgttcgtttcttcctttgcggtaggaatgacgaatccggctgcgattctcactttcctgtttgcattttcctggtttgggatttatgggcagacagggctggcagaagggatcggtttggtttgcggcgtttttattggaacgtacatctggtgggtaactctttccggtgcagcggccatcttcaagaaaaaatcaaaaaaggattacttacctgttatgaaccggatgtttgggctcatattaattctttttggagcagtgattctggttcgggattttctacattaaacaaaaagggagcactattatgaaaaaaggatattgcagcgtgttgctggtacttctttccgtaatagtactgtgtgcctgcggaaacagtgcagatggagagcaatcgtttcatccaccattaggggaagaaacacacagtgtggaaagttcaggtggggaagacggaaatactttggcagaaattacggaggatatatccgcggatggagaaaaggcatccccggatgagagtacaggtaacagtaaagagacagggggtgcacagatgcaggaaatgacaatagaagtaggagggcagaaatttcaggtgtccttatatgataatgaaacagtacgtgcgtttcgggaaaaacttcctatgacacttgatatggaggaattgcatggaaacgaaaaattctactatctggatgagggactgcccgccaattctgaaaatgtaggaagcattaaggctggggatattatgctgtttggttctgactgccttgttctgttcttcgaggagttcagcacctcatacaattatacccgaattggtcatatcgatgaggaagaagcgtttgtaagtgtactgccaggaggaactgtggaaataacctttgaggcaggagaataggagggaatacaatggaatttcaatttaataacataattgaccggagaaatacagattctatgaaatgggatgtgaagccaaacgaactgcccatgtgggtggcggatatggactttcagccggccccgcaaatcaggtcatgtatgattgaaagagcaaaacatggcgtgtttgggtatacgcaggtatcggatgaatggtatcaggcttatcagacttggtgggggaaacgccatggttttgagatacaaaaggactggctggttttctgtaccgggattgtgcctgcgatatcaagtgtcgtcagaaagatgaccacagtgggagaaaatgttttggttatgacacctgtgtacaatatattttttaattccattttaaacaacgggagacatgtactggaaagcgggctgaaatacgatggaaaagagtatcatattgactttgacgacttggaagagaaactgtcaaatccccagaccacccttttgattttatgcaatccccataatccaatcggtaagatatgggatagagaaaccttagagaggattggggacttatgcaggaaacaccatgtactggtactatcggatgaaatccattgcgatctgacagaaccaggatgggaatacactccctttgccagcgtttccgaaaattgccggagaaacagcattacctgtgtggcgcccacaaaggcgtttaacctggctggaatccagactgctgcggtaattgtcccggaggataacctacggcacaaggtcagccggggtttgcacacggatgaggtggcagagccaaatgtatttgccgctgctgcaccaatcgccgcatttacctgcggcagagaatggctggatgccctgcgggaatatctatgggaaaacaggagatttgcagaggattatatcaaaagggaaatcaaaggaatatctgctgtttccgccagagctacttatctgctttggcttgactgcaggaatataattggaaacggcacagaattttgccgttttatccgcagccacagcggtctttatctttctgacggaaacgagtaccggaatggagaagggtttctgcgtatgaaccttgcctgccccagaaaacaggtggaagatgggttgaaacgcctgaaggaaagtgtcccggcttatgaggcatgggtttgcaggcagtgctaagagagggggaagaattattcttcccccttaaggtatactctatgttagctggatttcactttattccaaagctcattataataactgtccacatcatctcccaggaagcggaaggtctcgcagttttccagatcttccccagtgggaaatgcgatccggctgtttctgatatcttcatcttctatcagcttgcgtccctccagattcggggtggaatacgtgatgaactcaaaattcatgagggctatgtccgggcggcagagaaagttgataaaggcttctgcattctctttattttccgcatttttggggattacccaggaatcgatccagacgtttgagccttcctttgggattacatattccaaatcgtggttttctctctgtgtatagattgcctctccggaataaatgacgccgatggctgcctcattgcctatcattttatccctcacctgatctatgacataggcctgtaccaggggcttctgttcgatgagatcattcgtggcctgggtaagttctcctacctctgtggagttcagagaatagccacggcgcttaagagccacggcaaaagcatcccggacgctgtcctgcatgagaatgttgtccttataagtttcatcccacagtacgttccagctgtcaatgggttcatccaccattgttttgttgtagaggatgcccacagtgccgaaacagtagggaaccgagtatttgttttccgggtcaaagctttttgactgctccatataagtagggtcaatattctttatgttgggcacattgtcccaattgatttccaccagaagatcgttctcaatcatgcgctgaatcatataatcagagggacagaccacatcataggagatggcatgggagagaatcttgggatacatgatttcattggtttcatactcctcatataccacatcaattccagtttccttctcaaacagttctatagcctccggatctagatattctccccagttatataccaccacctgctcattggaggtggaggttccctgtacccggtagaagattcctccccccacgataaggagaattagtgtcacaggaattacctggcgtacgggaagacgtctcttctttgccgagggatctttcctgtcatttttggattctttcggggaggtgtttataagtatcatcaataggataactgtcacaaacaaaagcgtggacagggcatacatctcaggacgtatcccttttctcacttcggaataaatttttgtggacagtgtgtccaccccaggtcccttggtaaaatgagtgataataaagtcgtccagggacatagtaaaggccataagaaatccggaaaccacaccgggcagaatatccggaaatactactttaaaaaaggcatacaccggggaggctcccagatccagggcggcctcgtaggtgcgcttattggtctgcctgagcttaggcattacacttaagattacataaggtatgttaaaagtgatgtgcgccagcaagatagtgctgaagcccagggtaaaccggcaggcgataaacagcagcatcagggagatacccgtgacaatatctgcattcagcataggaatattggtgatgcccatacagatggtcctggcccgggatttcatggaatggatgccgatggatgccgcagtaccgatgacagtcgccgcaatggctgagataaatgcaataatcagtgtggtgtaaagggcattcataatggcattgtcctggaacagggagatataccattttcccgtgaatcccccccacttggctcttgacttagaggcattaaaagagaggatgatcaaggttccgataggggcgtacagcaggaataaaatcagtcccagatatatttttctgcccataaaatgtgtcttcttccggttcatcagaacatacctccttccccgtctttgtcgtatttattcatcaccgccatactcagaaggataaataccatcatgaccagggacagaccgctgcccacatgccagttgctgccctgtttgaacttctgttctatgacatttccgattaggaggatcttgcttcctcccaggaggtcggatatgacgaaggtagtcagagccggaacgaataccataataatcccgctgatgacaccgggcatgctcagagggagtatgatcttccgaaaggtataagcctccgtcgcccccagatcccgggcggcattgatgatgtccctgtcgattttcagcagggcgttgtacaggggcagcaccataaaaggcagaaagttgtacaccatacccaggataatggcataaggcgtattgataatctgcagggagggcaggtgcagaaacccaagtatctgattaataatcccgtttttctccaaaagcgtctgccaggccatggtgcgcagaagaaaattcatccacatgggaagaataaagatcaagacaataaagccggactggctgacattcatattcaccaggatcatggccaggggataggccagaatcaggcagaccgctgtgctgatgatggacaggatcagagagagccccagggccttaaagttctcccgggtgccgatggccaaaagattgctcagggtaaagcctccgtcctccccggtgagaccgtaataaaaaatcatggcgaggggtatgaggataaaggcggcggcccagataagatacggccctgtaagtaactttttatgactattcatcgatggataccgcctcctcatcctcagattctggtttgttcatgatctgtatatcaaagggatctacatggagccccacccgctggcccaccggggacatatctgtgctgtgcaccagccagcagaagccgttggcctccacttccatttcatagtgcacacctttaaagatcaggtgggtgacaattccctgcatcgtcccctgactgggctccacaagatcgatatcctccgggcggatgaccacatccaccggcttgttttttccaaagcccacgtccacacagggaaatttcaccccgagtatctccaccagcttatcttccagcataatgccgtccagaatattgctctcaccgataaagtcagccacaaatgcattctggggttcattatagatatcttccggagtccccatctgctgaatgtatccctggttcataacaataattgtgtcagacatggtaagggcctcttcctgatcgtgtgtcacatagataaaggtgattcccagttcgtttttcagacggataagctcatactgcatatcctgccgaagcttcagatccagtgcccccagaggttcgtccaggagcaggaccttaggctcattgacaatggctcttgcaatggccacccgctgctgctggccgccgctgagagaatcggggtatctgctgccgaacccctccagattcaccagctttaaggcgtagtggatcttatccctgatataggtatccgtcttttttgctatcttaagtccgaaggcaatgttttccgcaatggtcatgtgggaaaaaagcgcgtatttttgaaatactgtgttcagattccgtttgttgggaggaaggctggtaatatcctctccgtcaaaaattacctgtccggaatccggtgtctcaaagccgcccataatgcgcagggtggtagtcttgccgcagccgctggggcccagaagtgtcaggaactcattttcccttatggagagattcaaattatctaaaatcacctgatcatcataggatttcgttatatctatcaaatcaattaaaatacgatccatttccagtctcctttgtacgggcgctttaaccgcctggcaaataagaaatttttccttatttgccaggcggttaaagtaccattcttagacaaattatacaggaagaggcaggtatgtcaataccatttttttatgttttccataataataagaagaaattttacacacttttatcctttggaaggaagatgttaaaaatacgtaataagattgtgcaaagaaaaagtttgtggtagaatgtttaaagattagtgtaaagttaggagggtattgcatgaataaagacaaatatgtggcatatgtaggaacctatacccatggaagcagtatcggaattcatctgtatgatctgaatgtggaagaaggcacgatgaaggaacggaaagtaattcctgtcaataactcttcccatatagcaaaatctaagaacggcaaatatctgtactctattgcagacgagggtgtggccgtattctccatagctcccgacggtgatcttacctttatcaatcaggtagacatcgacggcatgagaggctgtcatctgtccacagatgtggacggtaaatatctttttgtttccggttatcatgacggaaaggttacggtagtacatacccacagggacggcagactgggcagcgtcatggatggtgtgtttcacaggggcctgggcagcgtggctgagagaaacttccgcccccatgtgagctgtgtaaggcctacgccggacaacaagtatatctgtgcagtggacaatggaattgatcagattaaaatttaccggatcaatgacagaacccataagctggagctggtggatgtactcagatgtaaaagagagtctgcacccagaaatatcaagttcagcaaagacggcaaatttgcctatgtaatatttgagctggccaataccatcgaggtgtattcctacgacggaagcggaaaactgccgcagttcgaacgcctccaggagatcagtgttctggctgccacagatgatgaaaagcacgatgcagcttccggaatctgcctgtcacctgacggaagccacctgttctgctcaacagcgggggaggataccgtgggaatgtttgaagtagatcccaccgccggacttctggagaaaagatttgtgctgcctataagcggagagtaccccaaggatctggagatattcccggacggaaagcacattgcagttgccaatcatgcatccaataccattacgacgtttacaattgactatgataagaatattttagttatgaaagggaaaccactgaaagtagagacgccgaattgtatcctcatatctaaaatagaagaaagccctgtgaattaagaaaggaagtgttgttcatggaaggtgggcctagtcctaggtgggatagaatttttgaaaaaatgaatactaaagttctataggcaggatgcggccatttttcgctgccccctgtctgtaggcagcgaaaggagataaccatgattcgagtttttaagacaatggatggaaatatccatcaggtaaatgaggcaacagagggctgctgggtggcactcacagatccaacggcaacagagctgttcgagatctccaacaaatacgggatagaggtggacgatctcagggcgcctctggatgaggaagagcgttcccgtattgaagtagaggatgaatataccctgattctggtggatatcccagtcatcgaagagcggaacgacaaggactggtatgggaccatccctctgggtataattgtaacaaaggaaatgatatttactgtctgcctggaggacaccctgattctggagcgttttatggacggccgtgtcaggaatttctatacgtatatgaagacaagatttatacttcagattctgtataagaatgccagtatgtatctgcattatctgcgcattattgataagaagagtgtggaggtggaagaaaaactccacctgtctaccaggaaccaggagctgatagagcttctggagctggaaaagagtcttgtatatttcaccacgtctcttagggccaacgaggtggttttggaaaagctcctaaaggtggagagcattaagcagtatccggaagacacagaccttctggaagacgttattattgagaataaacaggccattgagatgtcgaatatctacagcgggattctaagcggtatgatggacgcctttgcctctgtaatttcaaacaatctgaatattgtgatgaagtttctggcaacagtaaccattgtaatgtccataccaaccatgattttcagcgcgtacggcatgaatgtcaacagcgcggggatgccctttgcgggaagtccctacggatttttgattgtgattttactgtctctgctgttaagccttgtggttgcttttattttctcaaagaaaaatctattttaagtaaggagcattatgaagtttttcaataaattagaacgaaaatatggaagatatgcaatttcaaatctgaccagatatattatcatctgctatgtgatagggtatctgcttgcactggcggcgccatggcttcttaccatacttaccctggaccctggtaaaattctgcacgggcaggtctggcgtctggtaacgtgggttttaattcctcccggaggacttagtatatttactatcattatgctgtttttctattattctttagggtcagcacttgagaaaacctggggggatttccgatataatatgtatattcttacaggactcgtggcaaccgtgattggttcctttatcctgttttttgtgtcagggggcagcaactacagcggtgccttcagcacatactatattaacctgtcaatctttctggcttttgcagccagctatccggatatgcaggtactgctctattttgtaattcccatcaaaattaagtggatggcatacctggatatcgcatacctggccatttccttctatcagtccggctgggggggacgggtggcaatcatcgcatccctgtttaactttattgtatttttcttcgccaccagggacttaaaccggatatctccaaaggaaatccacagaaagcaaaagtttgccaaagcagtgaaccccacccgcaccggggatggggtgacaaagcacaaatgtgcaatctgcggcaggactgaaaaggacggagccaacctggagttccgtttctgctccaaatgcaatgggaattatgagtattgtcaggatcatttatttacacatgaacatgtaaagtagaggagacaaggaatctatgagaaaaacaaaaattatttgtacgatggggccgaacacgaataaaaagacaaccatgagggcattagtaaagaatggcatggatgttgcaagattcaacttttcccacggagaccatgcagagcagcagtcccggattgatcttctgaagaatgtccgggaagagctgaacaaaccggtagctcttcttttggataccaaaggtccggagattcgaaccgggctgctggaagacggaaaaaaagtgaccctgcgggaaggggaagagtttaccctctatacggaagagcttgtgggcaatgaaaaaggatgttctattacgtatcccggacttgtaagagatgttgatgcgggcaataaaattttaatagacgacggtctgattgagctggaagtagaaaaagcaaaggcagggaaaattatctgcaaagttttaaacggcggagagctgggcgagagaaaaggcgtgaatgtgccaaatgtgaaggtaaaactgccggcaatcacggaaaaagacaaagaggacattctcttcgggatccagcaggagtttgattttatcgctgcttcctttgtgcgcaacgctgccgctatcaaagagatccggaagctgctgcgtgataacggcggagagcatattgccatcatcgccaagatagagaacgcagagggcgtggaaaatattaacgagattatcagtgtctccgacggcattatggtagcaagaggggatctgggggtagagatacctgcacaggaagtgccccatatacaaaaagagattataagcaaatgcaacatgaaatacattccggttatcacagccacacagatgctggattctatgatccgcaatccaagacctaccagggcggaagtgacagacgtggccaatgcagtctacgacggaacggatgcgataatgctctccggagagaccgctgcgggcaaatatcccattgaggcccttaagatgatgggtgagatcgcagaggccacagagccttatgtggattaccgttcccatatgctgcacagaagcatgttccgggaaaccagtgtatccagtgcagtgggaattgcagcagtgcagacagccaagaacattaatgcagactgtatcgtcacacctaccatttccggacagaccgcaaggctgatctccagtttccgtccggaagttcctatctatgcagtgacgccaaatgagtctacacagcacaagatgcagctctactggggggtgactccgctaaagggatatgaaaaagataccacagagcacatcattaaccatgccatgggtacggtaaaaagaaaacgtttggtaaagaagggggatctggtagtcttcacagccggagatcctgcgaccaacaccagaaccggtgagggagccattactaacatgatgcatgtggtagaggcaaaatagcagaaacaaaacgaggagatgaaaaaatgactaaagaaccattcgttacatacgaaaaactcaaagagatcaatgaagcttatcccacccctttttatctctatgatgaaaaggggattcgggagaatgcgcaggcggtaaaagaggcgttttcctggaacccggggtttcgggaatactttgcagtaaaggccacgcccaatcccttcctgattgatatcctgagggagtatggctgcggctgtgactgttcttctatgacagagcttatgatggcccatgccctgggctgcaggccggaggaaattatgttctcttccaacgcaactcctgcggaagagtatcagtatgccagagagataggggctatcattaacctggatgatattacccacattgattttctggaacaggtaacagggagcattccggaaaccatcagctgccgctataatcccggaggattatttaagatcagcaatgatattatggacaatccaggggacgccaaatacggcatgaccacagagcagctgtttgaggctttccgtacattaaaggcaaagggagcaaaggaatttggcattcacgctttcctggccagcaatactgtgacgaatgagtattatcccatgctggcaaaggtgctttttgaggttgcggttaagcttcagagagagaccggcgcccatattagttttatcaatctttccggtggaatcggaatcccttaccgcccggatcaggagtccaatgatatccgtgtgattggggaaggagtccgcaaagtatatgaggaagtccttgtccctgcaaggatgggggatgtggctctctatacagagctgggacgctttatgatggggccttacggcgccctggtgacaaaggcaatccatgagaagcatacccacaaagaatacattggctgcgatgcctgtgccgtaaaccttatgcggccggctatgtatggggcctaccatcatttgaccgttatgggaaaagaggattccccctgtgaccatatgtatgatgtgacaggttctctctgtgaaaacaatgacaaattcgctattgaccggatgcttcccaggatcgacaaaggggatctgctgtttatccatgatgccggagcccatggattttccatggggtataactataacggaaagctgaaatctgcggagctgcttttaaaagaggacggaagcgtgcagatgatacgcagagcggagactgcaaaggattattttgcaacttttgactgttttgacatctatcagaaactagtatctgacaaataatatacgatagcagggggaagcatttgctcccccttttttcatgtgcaaaatatcactgcctgcatgaaaggaagaaataggatggaagaatttaccaattaatggtataatagaataggttgcatagtaaaccattggaaaaaaggataaaagggaggagtcctacatacggcagcatggtgcggatcactggtttagcattgccttctggcaatgccttaaggattgagggaggaaatgatatgaagtgtccagattgtgaagcggagatttgtgcaggtctaaagacctgcccggaatgcggctatgattttgagtatgaaaaagaaaaacaagaatcgtctgatgtacccgagcagacaatgcagggaggtcctgccggtctgacggagcgaatcaaagggaaagtcttagtattgctgggaatcggagcggtggtcctggcgattatctgtggaattgctgtttacagctggaacagagattctggtgaacagaatgcaggaaaagaatccaggacaggcttcactgaggtacagaagaatgctctgcagggcagtacagcggaggcgaaagcacagactatggcgtctgtgctgtttttctgtataaagaaggagggccagtatcccttagggatactggcttatgaaaaagaaaaagttttgcgttaggttgttggcctcttaacaattattataatacacggtaagtgtgataattctgtgatggaagattgaagaaaagatgaataaaaacttaaagaattaagacttcttttctataaaggtcagcgtcaggcggtgcatggctctggtgcaggcaatataaagcagccttctgtcaaaggctgaggaccagtgtgacttgtggcctccgggtaggatgacttcgtcaaattccagcccctttgccatccgtacggacgtgacagtaaccccatttttaaagcaggaactctccggggtaagtaaatgtatcctgcatttccgggaaagaatgtgatacagattttctgcttccttttctgttttgagtataatccccagagatgccaggtttcctgaacgaaaatcacaaatagctttatatatatactgaacctcttcccctttgcttttcagacagagaattcccggcttttcaccgtgccgttttaccgcctccatggaagggacatcctgaaactgtctggcaaaggtaattatctcataggtagagcggtagcttttattcagtgtgatatattcagcttccggataaaggcggcggatgtcttccggtgtatgcagatgagagggattcagcccctgcccaaagtctcccagaatggtcttggtacagggaaagagaagattaatcactgcatactgaacaggggtataatcctgcatctcgtctataaccagatgcctggtaagacggctggtctttaggccgtcaaaggctgaagccagataaagataggggcagacatcagcccattcaagttctttttgcccagaaagtttaagcatatctggggcatggatcgatcggtaaaaggctttgtagagtgacagagagctttttacggtaagcataccggcaagcgatttttgaatggaggttacagtgggaaattcatcctccatgataagatctgtttttaaacggtcacagatatcctctgcggtccttccaagccgttctctgacagaaagactttgataggataaaaaacgttttttgatccaggcacctggtatggtataagaacccaaagaataatccaaagggtgaaacaccagctccggcacctgttttctgtatgcctccaaaagagagaggaactgcagcgtggatttaaagcgcatgcgctgtatccatttggcatcctgcaccgcaaggggatctctttccctctcaaatctaagggtatgtcccagctggatgccggcaatctctgccaggctcagttcataaataggttcttcccccagttcaggaatgacattcgagatataatccccaaacaccttattgggtgacagaatggcaatattattggcattcagctgccccctgaaccggtagaggagaaaggctatccggtgaagggcgatggaagtcttcccggaccctgctacgccctggatgataagagtctgtactttttcttttcggataatctgattctgctctttttgaatggtggatataatagacttcatcttctcgtcagaggtatggcttaattccttctggagaatatcgtcctggaccgtggcggaggtttccagggtgtactctatgacgccgtccttaattttaaactgtctttttctggtcagttctccctctatccttccctctggggccgcataacccgcaggtcccagctcacagtcataaaacatactggatatgggggcgcgccagtcaaaaataagaggccgcttttcacagaagaaagcagacctcccgatataaaaagcttccggcacctcctctccctggaaacgaaaatcaatccgtgcaaaatagggggattccttcagacgtgtcagtttgttccggatctcaacggcaaatgcccctgtctggtccgtctgtttcagcagcagttcgttttggaacatttcgtgagggtcaagctctccccggttttctgccatatatcttttagcatttctgtaatcgctgtccagattctgtaccgattcctcggctttcttcagggcttcctccagctttgcaagagtcagtttcaagtgcttttgttcatccggaaagggaatggcatgctctttactcatgggatgcctcctgcctgaggacaaactgctgggtggggtagccgaactcttccagcagttctccttcagcaaatccaagttcttttattgtctttcggtgtcctgtgtcagcccgatcccccctgcggaatgtggtcgtggtgatttccctgccttttaggcattcattcatcactttacccagaaatgcccggggaatccctttttttctgtacaggggatggcatcccaggaaatcaatgctccccctgttgtatgagaagagcaggattccaactgccgtttttccatcttttacgatcaaggcctgtctggtgcgaatacggtgctttagctctgagagatattcctcttctttcaaatggggaaatccgtcaatcacaagacggaccaattccatccagcaggggatatcttcttctgcagcaaaggcaatttcccataagacatcatctttccggttcagcatctgataacttccctccaattcaaacctcagctgcagaggatagaactcctcattctccctgtaccggctgggcggtatcttgtacattgcagtaaatacagaagtaaaggactgctggctttcaaagcccgcatccagggcaatcccaaggatgggacggtcggaaaaaaccagcagtttagcggcctcagtaagccgccttctctgcagatagtcgtggatcgtaagtcctgtggcctcggtaaacatacggtgaaggtaatatttagaatagtgaaccgcctctgcgacagcatccaggtcaggggcctctgcaagatgcaactcaatatagtcaatgacagataaaatactgccgacactgttctttggcatatgtgcagcctcctttcaagcattattaggctgatacagcagtttgtcttctggctgttctgctgtcagcaagagcattatacctgaaaagtaatcacattttttaatcattcttgctgttttacaggaagtctcagaccctccattccaccacatcagagaacggctttctgggcctggcagagggagcttccttgggatacccaagggaaagcgccgcaaaaagggtcccctggggattcagccacgcctggagttcttccaaagcaaaaaagatatcacagatccacaagcttcccaggcccagcccggctgctgccagggtcatattctcaatggcagctcccacagactgtgcattgcagatctcaaaaatccggtcttcttccgtcagtggttctgacaggttaagcccgagagggttggtgataaaaatagtaaccggagcctgtctcatgatttccagagtattccgtgctcccccaagatgctgccggcagccgggaagcagaggggttcgggattcccggtccagtccctgctccatggcttttagcatatcagacttagaactcccggaaactactgtgaatttccatggctgtctgtttttggaagagggtgcaaggattccggcctgcaggatctcttctatgaaaggccggggtatgggagtgtttttatattttcggatacttcttctttcggctatggtactcagcatattatgattcctcctgattgtaagtattcctattatatcacattcccatggcaaacaaaatgtggccccctatgactggaaaaccgatcataggaggccataaaagtatctgattatttaggatcgtaatcaatagccggacgtcccggtgcgatgttgcggtagcattctacgattaatcccagatcttcccgcagatcaagataagagaagtccatgaggttattcatggcctgaccgcggatccatggctcactgcctttttcttctctgtattttgccaggacatcgtcatactggtcctcagttacaacagcaatatgatgtatccccggaccgtgttcatccagccattctttgtacggggtatcgccgataggttcaatcaactcaaactccattccgtatctatgtaagaaggccatcttagacacttttcctttaaagggctttccgtctatttttaggtcttcacaggggccttcattgcacatataagacacttcccatggacccatgcccagtttttcttcgaagttttttacggaagtatctacatctcttacgatgataccgatttgtaataattgcttaaatgcaggtttcatgatatgttcctcctcattccttatgttttgtgatgagacaatcatacatcgaaaaaaaacatgtgtcaatacttttgaaaaaatatttattaaaagtataaaaaaaagattgacaaacagatatgcgtatgaaataatgtgcttaagttaaatgtgatacgaattccgcaaaacggcgcgcaggagttcatgcgtaacacaaagtgacatgttgctaatctaatagaggaacaggggggagagccgggaaaataagaggtaagaattaaaaccacaatctgcatcgagaagttctgtttagtacttattatagggaaaagaaaggataggattatgaaaaataggatgaagaaaattatggcccttttgttagccggagttatgtgcgtaagcctcagtgcctgcggatcgggagatgacaaggaaagtaaggaaagcagcagtacagataagaaaacagaggctaaaacagggatgaccatagcacagaatagctttgtatccggggattatgcatttggaattatgaaaaaggcttctgaggttgtgatagagggaagtcagaatacactgaatgaattgacagacaatgcaaatatcaataatgttcagtcagatgtagagaacatgattaactctggcgttgacggggcactttggtggggagttctggactcttatttccaggtgggtccccagcagttcaacgaagccggcgttccctttgctttcttcgactgtgcaccgtccacagaagagatacaggcgcctatcgatgagatggaatactatgcaggcagctgtatcggggataacgaggcattcggggagcagatggcagaacaggcactggcagacggatgcaaagaagccatcgtatttgccaatgaaatcgggagcagcgtagcgatccgtgcggagaaatttaaagaagtattcgaagccggcgggggaaaggtggacgagatctctcatgtttctactacatccaatgcccacattgaggcaacccagaatatgctggccacctatccggatgtagactgtatctacggtgtttccattgcctacgcgctgggttcctatacaattacctcccagatgccggaccgaaagattaatatttatgctacagacattaccccggactccttagactatctgaaaaacaacagcattcaggggttaaacggaggacactgggttgaaaactatgtggccgcagcgctgcttctcaacaccattgacggcaagaaaactacagatgaggatgggaagccattaaatctggttgtagatcctgtagttatcacaccggcaacagctgatctgtatcagaagttctggattgacgaaatgccctattcttacgacgaaattaagaatcttctgtaccgtgagaatccggatgtgactgcagctgatttcactgattttgtagaaaattattctgtagaaagtgtactgaaaaataagctggatgccggaaaagtgacccaggaagaactggatgcagcaggcataacaattgagaaatagcagacggacatcaatcggaagaaatacggttccgggctcttcagcggtaaatctgtctggagagtccggccagtaagaaatggagtagttgtatgagtgacaagaaatctttcttatcccaggagacccgtcagggtcggatcctaaatatgctaatttatcccgtgctctttttggtggctgtacttattatgaacattgccgtgggaggtgctctgctgacgccaaaaaatctcagcatcatttttgttaactgtgttcccaatgtatttgttgcgtggggtgtcagctacatatggtcaacaggccctgatttttcctgtgctgcaggtatggttctggccggacaggttgggggaattctcgcggtaaattatcatctgggatatctgggaatgttcgggggatgcattctgtgtgcggtggttctgcagctgatatccacagggatccgggtaaaattaaatatgaggccttgggtaatcggaattgccatgtgtctcatctatgaatccttcggcattatgtactctactgcctgtgcggcaaaggggcatgagaccgtgacaatcccctccggattgtgtgcaggaataacgaaaatgccgtggattgtaattcttctggccgcaggcattatctttatgtatcttctgcacaccagaaccagctttggattgaattaccgggcattatcctgcaatgagtatgtggcggagcatatggggattaaccggaaaaagaccatttacatcggggtaagcatcggagcagttatgatggcgatagcaggagctctgaccatgattctcagcagccggattacggttgcttccaatcttggaagcttcggatccatttccaaaggactctgcgcatggctcttgtcctccggaatggacaataaagtgaatcctcctaccgctatctttatcagtgcattgtttatcgctgtaatattcaacttcctgacaaggctgggggttccccagggtacctggctggatacaatcttaggtgcgtttattatactgttcttatgtatttctgcacgcacttccaaggaggcggtttaatggcaaaggagattatatttgaggcaaaaggcattaataaatttttcgggccaacccatgcaaacagagatatcagcctgaccgttgagaagggaaaaatccacgcgctggccggggagaacggttccggaaaatctacgctcctgggaattatctgcggacttcacggctgtgacagcggtacaatgaagatgaacggtgaagagtactgccctaaaagcccaatcgaggcaaatgataaaaaaatcggatatgtagttcaggagctgggtcttatcaatacccttcccgttgcggtaaatatgtatatcggacatatggaaagatataaaaagatggggattctggacatgaaccgcatctatgcagatgcaaagacagaactgggcaaatacgggtttgcaggcgttcatcccagatatcctgcaggagccctgtctgtggaaaagagaaaaattgttgaggtagtgaaagcactttccattcagccggatatactgattctggatgaaaccacccaggcattatcctacgacaatagaaaaaaattatataccatcatacataaagcaaaagagagagggaccgcagtgctgctggttacccatgatctggaggaaatggtggaactggctgatgaggtcactgttctgaaggacggggcggtatctgccgacttgagcggcgatgagatctgtgtagaccgtatccgaacggccatggtaggacgggagatggtaggcagctattaccgcaatgactggaccccgtcccacagcggggaggtatccctgcacgtagaggggatcagtgcaaaaggccacttttctaatgtgagctttgacttgcataaaggggagatcctggccatctgcggcctgtctgatgcagggattcatgaggtggggaaagcactcacaggcattataaagacaaattccggtgtgataaaagagacggagggaggcagggagatcaaaactccccaggatgccctgaatgcaaaaatagcatatgttccaaaggatagggatcatgaggcactgatgatgaatactaacattcgatccaacctgtatatgccctccacaaaagaactggctggcggggcaagattcataaaccccaagagtgcttccaggcttgctaaaaaggccattgaccggtttaatgtgcgctgcctgggaatgaatcaggcaattgccgcactttccggaggaaacaaacagaaaatcagtatcggccgttggcttattaaggacttgaacattctgattatggactgtcctacccggggagtggatgtatcggtgaagcagtacatttatgagctgatgcagcagctgaaaaaggacggcaagtctatgatactgattgcagacgagatggctgaggcaatcgggatggcagatcatctgctgattatgaaaaatggtgaggtatcaggggttctggatagaagtgaccttctgacagaagcacaggtaatagaggtgatgatatgagaaaaaaatatagaattgcctgggggagtattgcgccggtattgtttatattgttcctgattatagttctggcagtactgacagagggaaggctgatccagtcgaacacattaaaatccctgcttacacagtccatcggctacctgatcggagggctgggaatgatttttgtcatggctctgggcgagatcgatatgtccatgggagtgaatgtggcattatcctgtgtcacggcaaccgttctggtgggagaacagggatggctggcagtcgtattgtgcagtatggttatcggagcgctcatcggcgcagtgaatggcctttttgtggcactgttccatgtacagggatttatggttaccattgccctccagatagggcttcggggggcgatcaaaggaattttcctgttaatccccgatggccgtattacctttaaccaggagattttaaagtttaatacactttcaattaagcttacaattttaatcattgccgtgttggctgtggtttatctgatggaattttctccctacggcagcaagctaaaagctgtgggggaaagtgaagtgtgtgcttttatgtcagggatacctgtgaaaaaagtgaaagctgcggcctatattctcagcggacttttcgcggggcttgccgcattatttatgtgcagccgtcaggggggaatcacttcagatacggggtccgggtttgagatgactgtgatgctgggcatgttcctgggcggtatccctgtagaagggggaatggagacgaagctttttaagaccatcataggcctgccctgcctgattattatacaaagcggactgactattcttggtgtggatgccggcatctaccagtttgtggaggcagttatccttctgatcgtcatcataatgacccacttccttaaaaattacacaaagcagagggatgaaaagatcatggcacaggtgcttctggaagaggaagcaaaacaggcataaatagaatttatataaaaggagaacaaagacatggaatattctaaaattacaggaattgacaaaaaagtaagccgttttattgtgggtacaatggcaattgtggacagagaggatctcacggaggattttaaacgcctggacgatgcccttgagatgggaatcaataccctggatactgcaatgggatacggacggggaaccactgagattgccctgggaaaatattttaagagcagggggaaccgggaggacatcttccttatcagcaaggcctgccatccgtcaccctggagaacccgtgtaaacacctttgacctggaagcggatttgaatgatgccctggtaaaaatgaataccgattatattgacctgtatatgctccacagagatgatgtgaccaagccggtgggacccattatggataccttatataaatactataaagccggtaagattctgggctatggtgtatccaactggaccgtagagagaatcgaggaggccaatgcttatgcgaaagacaacaatatccctccccttatcgtatccagccccaactacagcctggctcagcagtatgcagaaccctgggctccgggctgcgtaacggttagcggtccggaaaatgcaaaagcaagacaatggtacgccgaaaaccagatgccggtgctggcctattccagtatggccagagggctgttctcgggcagaatcacccgtgaacagtgggaaaaccgtccggaagagattgacccggtttgtgcgaaagcgtactgcggggatacaaactttaccagactggagcgggcagccgaattagcagaagaaaaaggagtttctattccccaggttgcacttgcatttattctctgcggaaaaatgaatgtattccctatcgtaggtgcggcaaacaaggaggagctcgcttccagcgtcggggctttggaggtgaaactgacagagaaggaagtggaatggcttgatttggagagagattgcagataaagaggccccactcattttccgggaatgtatgaattctcaatcaggataaagcagggggctgtaccgttgccccctgctttatctgtgcgctggcagcgatttacccccggctgaagatttttggatctacatatatcagatggatttataaggaggaaaacatgaaagtattaggaatctcttttggcagaaaaggccagaattgcgacattgtctgtaagcaggcattgttagcggcaaagaaatcaggtgctgaagtagaatttatcaatacctgtcatttgaacatagaccgatgtaccggatgcggggcatgtgacagaagaatggaaaagggaggtccctgcagatgtgtcataaaagacgattttccgtttctggaagaacatatacttgaagcggacggcatcattttgtcggctcctgtctatgtgctgggaccggtgggacagtttaaaaatcttacggatcggctgggtccctcccacgatcgggcttatatgatgcagcagcagcagaaacgtatggcggagggaaaaaccaaagaagaactcatggatgagcggttatttaaagacaggtttttaggtctcatctcagtagggggtgccagaacagagaactggacctctctgggacttttgaatatgcatctgtttgccccctctatgcagatgacggtggttgaccagatgaatgtctatggcatgggagacagggtgagtccggtgctggatgagagactgatggaacggctggcagcgatgggagaacacgtggccgcctcagtggggacaccccgggaagaggcaaaatggtacggggatgacaaggggctgtgccccgtctgccataacagaacctttaccattaaagatgcccggcatgtggagtgtcccatctgtggaatgtacggggaactgaaacttcagggggaggatgtcagggtggaattttcaccggaacagatcgctcagtgcagataccgtacccagggagtaattgaccacagaaatgagatagattctatgacaaagcgttgcatccgtgtaatccgggaacagggggagcagatcaaagaactgctgaaaccgctggatgagattcaggagctggacaggaaagaatttactgaaaagtaaaggggaggcagtcttaatgaaagagacaattcaggatctgttaaacagaagatctgtaaaagaatttagagaagagcagattaccagggaagaattgctcacagttctttctgccggtatgaacgcgcccacggggggcaatcagcaaagccccgtttttcttgcagtacagagcaaagaatggatggaacgccttcgccggctgaacggtgagattgcgggagcgccggaaggatttgatgtgttctacggggcccctgccattattctggttctggctgagaaaggaaaaggaaatccggtggaagacggttcactggctataggcaatatgttgaacgccgcctatgctctggggctgggcggcagatggatacaccgtatccgggaaacctttgagcagcctcttggaaaagaacttttgagagaggccggatatgagggggaatatataggaataggatcctgcattctgggatatcccaaagatgggtttcccgcccctctgaaaaagaaagataactattataaaataattccccaggaggaaaaggtatgattaaaatagagacagatttggcagtcgtggcagccggacccgccggccttgccgcagccatcacaggcgcagaaaaaggactggatgtgtgtgtatttgagaaggcaaaagtagcggggggaactgccaatatgggaatggggccttttgctgtggaaagccatattcaaaaggaacatatgataggtctcacaaaagaagaagcgttccggatgatgatggattatacccactggcagacagatgcacgccttgtgcatgactatttctggaagtcggcggataccatccagtggctggaggatatgggagttcaattcgcgggagccatgaaatactatccggaatcagaggctacctggcatgtggttcagccctctgacggcagtatcccaggtcccagagcagcttccactatgacgaaaatcatgtatgagagagccgtggaactgggtgtacatttctactttgagaccccggttacccggcttctccgggaagcggatgacatcatcggtctgaacgcatccggaaaagacggggagacttatgaggtagacgccctgagtgtagtgatcgccacaggaggatttggggataatccgaagatgattcaggaaaactgcggctttgaatacggcaggaatatgtttaatttccgggtaccgggtgttgccggggacggagtgaagatggcctgggaagcaggtgccggcaaagggcatatggagatggaaatgatcctctcctcagaggtgactgcttccggggaagactatctgttcaccgtgggattcagccagccccgctctttgattgttaatagagaaggcgaacgtattatgaatgaagaaattatgcagaatgcagcggagtccgcaaatgtctgcagacggcagtcaaatcaggcattttatgcggtcagctgcgacaatatctttcagctctacagccagaagggcgttgactggccaagcggtgtgcttcacggggattatctggctcatgtggacgaggaaatgcaacgggcaatggaggcgtttcccggatccattgctattgcagattctctggaggaggcagcagaagaaataggaatagatgcccgggccttacgggaaaccgtagaagaatacaacactggctgcagggagcattttgatgatctgtattgcaagagcagaaaatacttatcgccaatagagggcaaaaaatattatattatgaaatttcttcttggcgcttacggctctctgggaggaataaaggttaattcccgccttgaagtgctccaggaagacggacataaactgtatggattatacgcggctggatccgatgtatgtgacttatatgccggaacgtatctgtacaagcttcccggcaacaccatgggatttgcggtgaattccgggaggatggcggcagagcgggcagcagcttacatagataccatggaagaagagtagaggggaaggcttatgggtaaagtaaagcttgtcatagacgatcgcctgatcgaggcatctgaggaacagagtgtcctggaggctgcgctgcaaaacgatatttatattccgcatatatgtacccatccggaccttccggtacaggggaactgcaatttgtgcgtggtggagattcaggggcaggaaggatatccctgcgcctgtgagacgaaggtccgggaggggataaaagtagtcacaaaatccccggcattgtctaagaaacgcgggatggccatggaactgatgctggccggacacccccacgactgcagcacctgcaaacgctacggcaaatgtgaattccaggccatgctccagtatctggggacagtgcattcccgaatgagaacggttcacagcaaaaccacatccatcaatacggataatcccattattgtcagggagatggagcgctgcatcaaatgcggaagatgtgtccgcatgtgtgaggaggtcaggggcgttggaatctggcagtttaagcagagggatggagagacctatataggcacaaaagatgatatagcgctttgtgaggcggactgccgtttttgttctgcctgcgtggaggtatgccccacaggagcgcttcaggatgcccccggactgttccgggaggatcttccgaaggaggatgccctggtgccctgtacggcagaatgtccggcgcacattgatattccctcctatgtccggctgataaaagagggaagctattcagaagccgtgggggttatccgggagaaagtgcccttcccccatgcgcttggatatgtatgcaatcacaggtgtgagtcgggctgcaaacgaagtgcattaaatgagtctgtatcaatccgggatctgaaacggtttgcagtggaacatgatacagaaagggtctgggaaggaagaggcttcagaaaagcgcccacgggaaggaaggtggccgtggtgggaggaggacctgcgggaatgacggctgcctattatctgacaaaactcggacacaaggtaacggtatatgaaaaacagaagatagcagggggacatatgacgggagggatgccggaatacaggattcccaccaaggatgtaaagaaggaattggatgatatcgtagcagccggtgtggagctgatctgcggtcatacggtagaatctgcagagctgctgagaaaggagtacgatgctgtcctggtagcggtgggaacttccataggaaaaaaactaaattaccttcccggctccgattttaagcaggtttatacggctgtggatcttctccgggcaagcaggctgcagcaggaaatccagctgggaagacactgctgtgtaatcgggggcggaaatgtggctgtggatgccgccagaacactggtgcgtatgggcatttccgccactatgatatgtctggaaaagggagaggcgaaaaaatccgatccggaggaactgcaggaagccatagaagaaggggtaactgtgctggaaggatactccaatgaggcgattgagggcaccccggaacaagttaccggcctgagggtccatcagatatatgatttttattttgacacggaaaccggaaaactggtggagaaccagattcctgattccacagaaatactgccctgtgattctatcgtatttgccgcggggcaggcaaccggacttacggagtcatttggtctgaaattgaatcagtttgggtttccgctggatcccaagtctggaaaaagcggttatgaaaccagtatagacggcgtattctgcgcaggggatgtcattaccggcacccggtttgtaatcgacgcaatcgcggggggaagagaggcggcgcggcggattgactgctacctgggaggggacggagagattgacgagaatcttattccccgaagccgcagccccagaatcggaaaagcccaaggatttgccaaggccaaaagagagcatatgcaggtaaaacctgcaaaggaccgcaaagagaactttgagcccatcgcagacggatttacctgcggacaggcagactgtgaggctagccgatgcctccagtgtgatctgaggaaagatattaaccgggtgaaggtctggtcagaatatggaaacagataggaggcggcggaatgaactgtaatgtgggaatagaatatgttcctgatttttcagaactggaaaaaggaatagataaagatggaaataccctgtgtccggtccattggacaaaagagtgcatccgggctgccaggctgcatatatgcgggaagacggtagcctgcagggagggacttacacagatgtacctgattacccaagacattacgtcaggggcaggacgtgcccgggatctggaactgctggaacagacagcttcctatgtggcagaagccggagggtgcaggacagcagaaaaagcagcggctaatacgttaaaaagcctggagctctaccgggaagagtgggacaaccactgcaggagaaagcggtgcgctgcttttgtctgcaaaagttattactcagtgatctgctatccggaaaaatgccagggatgtacaacatgcatggaggtatgccccgccggtgctatctcaggagggcccggactgatctgtgtggtggacgaatccctctgtctgcgatgcggcaggtgtatagaggcatgccctcacggtgccagaggcaaagccggggagatgcgccctaaattgccggaggccccagttccggtgggcagctttactgaaaaaacaggaggtgccaggagaaaaaggaagacacatacccattagaaaatgctttgacaaaactctaacaaaatgttaggctactcttataagatcaaaatggacaataagtagtaggagacagatatggagagtacaaagaatagcgatgttcgagccaataaccgaaaaagagtagtcaatacattatttcgtgaggggcctatgaccaaacaggaactggcgttaaggctggatatcagcctgcctacagtaacactgcttctaaaagagataacagaaaaaggacttgtgacaaagggagaggtattaagttccaccgggggaagaaagccggtatgtatcacccctgtctatgatattaagtattccatcggcgcggagatatccatgcatgagataaggcttgttatgatcgatcttggatctaatattgtagtaaaggaatcttacccctatggtctggagagaagcagagagtactgggagaagatcaactgcgtgttaatggattttatggataaaaatataaaagacagggataagcttctggatatcggcatcactcttcagattcccatgaaggacggtgcagcaatgtggaaaaaggatactccccaggaacagagagtggatctggaactggcggaatcctgctttgagctgcctgtcaaattcagaaacagtgccaagatggcggcaattgcccagatatgggcgttgaacgacagggagaattttgtctttgtttctcttggctcttatgtgggaggcggaattgtctataatagtgtgattatgggattttcagagctaaacggacagtttggcagtcttatgatgggaccggaacataagaagctggaagaagtgtgcacggcaaaatccatctgccagagggctggtgtggcttctgtggatgagctgatgaaaggaatagaggaaggcaatatcagatttcagaagatttgggaggaatacctggacactctgagcattatgttctataatctacactgcatatttggctggaaaattgtcattgggggttccatgagcccttatctggccggaagcaaagagaagctggaatatcaaatcagcaggatgaatgatctggaagaagaggatgcttcttatattcatatcagtgatctgggggcttacggtgccgctgtaggggcggctatgcttcccattgatgaattcctggagtttggctataatgaactgtaaatagaggatttgaggaaacgacagggcttcggctctgccgtttctttttaccgtaaaactttctcctgtaatttccagcaattttcccaaatatattgacatttccacctgtattaaggtatacttaagttattaagatagttttataaaagtataatataaaaggagcgatggagatgttacagcaaaaaacaggagtaggggtaatcgggtgcgggacgatcagcgacgtgtacctgaagaatatcaaagagcattaccataatctggaggtaattgcgtgcgcggacatgtatccggagaaggcagagcagacaaaagaaaaatatggaattcccactgcctgcacgccagaggaattgctggcagatgaaaagattgagattgtgctgaaccttacggttccggccgtacattaccagattaacatgcagattctcaacgccggcaaacatgtatactgtgaaaaaccactggcattaagcctggaagaggcagatactattgtgaatgcagccagggaaaaagggctgcttgcggtcagcgcaccggacacttttctgggagctggagcacagacctgcagaaagctgctggacgagggtaccataggcagaccggtaggatttacggcaaatatggtagcgccggggcatgaactctggcatccggcacctgcattttattacaagaagggggccggccctatgctggatatgggaccctattatattactacgctggtttctctgctgggtcccattcagaggatttcctgctttgctgtggcaggaaagacctgccgtgagatacaggggaaaatggttgagacagaggttcctactcattatgcgggaattatggaattcgcctgcaaagctgtggggaatattaatatgagcttcgatgtgtgggattccgatcttcctgtgctggagatctacgggaccgacggggctttatctgttccggatcctaatatgtttggaggagaagtaaagatttacagtggaaagaaactgaaatctatggttgatgcagagacaaggcctcacccggcaaagcttatgactatggtgtcacgaaaaggggaatgttcggaaagggttgatttgttgtttcctgcagatccggatccccgctgtaatatgagaggacttgggctcttagatatggcccgggcattgaaaaacaacagggccagccgcctgaacagtgaactttccaggcatgtggtggaagctctggctgctttccaaatagccgcagatacaaacactgtatatgagatgaaaacaacatgtaaaaggcctgaagctatgccggaaggactaatgctttgggacactgaataaaagaaaaagacaggagcagccgcagtatggagtatggatactgcggcttttgctgtagttccctttattttatatggcattttactttaagaatacctggggcagactaaattcaattcgaaaatcaacaatattaaatataaaatcaaaaatattaatataaaagttaataatattaatatagttattgacattttaaaaacgtggtgttatattgttaacaagagaggaagtgaggcaatgaataaaatcataagccgctgcccggtatgcaatcatgagctcactgtggcaaggctaaaatgtgattcctgtgatacagttattgaaaataattttaaactcagtaaatttgattatctatcagacgaagaactgtattttacggagacatttatccggtgcaggggcaatataaaagaagtggaaaaggagctcagtatatcctatcccacagtaaggtctaaactggacgctgtgattaaaaaacttggctatgagacagacgccggggaacaatctatgaaaaaggaagagatcctaaaagcactggaaaacggagagataacagcagaacaggctattgcacagctaaaataataaaaagggaaggatgttagttatggacgaaaaactgagaatattaaaaatggtggaagagggaacagttaccgctgagcagggtgcggagctgatggcagctttgaatattgacctgccggcgcagcagacagggcttgtaagaagcagctatgataagaaaatgttccgcattatcgtagacagtacatctggcgataaggtgaaagtgcagttcccagtaggggcagtgagaaagattttgaaagcaaccggaaaactccctataccggaaaaagacctgcagggagtggatctttccagtatgatggatgccatatccgaatgcctggatgatgagattgacggtgattttgtgaatgttgaagcggcagacggaaccacagtaagggtatttgttgacaaatagagggcaggtatatgcgggttaaaatcaggacaaaggattttcgcttttttatgcctgtaccagtcactttgattggagttgttgtaaagatgctccctgaccgggtgtttgaggagatgcgtgtaaatacgcctactccttactgcagcttggttacaaaggagaatatcagcatgatactgggagaatgcacggatattctaagagagaataagggactcgaaatccttcatgtagaggctaaagacggtacgtttgtatccataaaactgtagaagagtacgggaggtttatcccttctgaaaggagcaagtccccgcctgccggttatatgggcaggcggggacttgctcctttcagaacaggttacttatatatttttcccagaacctgatgaatataataggaagaaagcgccatagaggcaagcaaatcaggagttccgtcatcttccacagacacccagcccttaaacccatgctttttcaccagtttccagagcgcttccataggcagtacgccttctcccggctcccagaaccagcgccagccgtcatctcttatctcgacatccctgtcgtggcggatctcgtcaggaacattaatagaatctgtgtccttgaaatggaaggtacagatacgctctgcatatgtatcgtagaaatccagaagatcgtctcccagaattgctatctgggcggtatccaggcagtagaagacatatctgggatctgtcagttcaatcagtttccggtggttttctttattaacggcacagaaaaattcattgtgaatcccaatctgaatcccgttttcaacggcgtaccggccgatgtcatccagtacccgggccgtatttttcagggcctcgtcgcttagggggcctgcctccgaataatttttggcagggcatacattcagatgtctgcccccgaaggctttcagtatatcgatggcatcttttccggcctgtacaacttcatcatgtttttctgctatctcagaatcatcgcatccgtggaacataccgctcacttttacccccctctcccctgcaaatgcagcgaattcctgaggtgtgccgaaaagccccagcatttcatttaagtcccagggcgcaatctcgattccgtcaaaaccggttgccttgtgataccttaaaatccggtcccagtccataaaataggaaacattgcttttatcttcataatacaaatcacgaaagttcggtatctctttatacgggatggttttccagtggctcatatgggaaagtttaatatttgacatgttgaatacctccatttcttatgaaacaagtgtctggttaatataatagcgggttcttaaaagagagcggcacacatcgtaggagtgacggcagttaaaaacaacctgtccgtcatagccgacttcctgcaaggcatcatacacggcccgtaaatccaccgttccctggcctatatcccggaataccttagtggctgcttttgccggatattcaggcataacctgtttgtatgcctcctgatcgtctgagaatgcggtatctgtgaaatgtaccacaccgattctttcccggttccgtctgataaaggcagcaaggtctgtcccggcaatctgaagattggcggtgtctatgtccaggtatacaggacctttcagtctatcagcgaattcctcgatgctgtcgcctttcactaaagtccagtattcattcttaagacaaagctttacgcctgctttctctgcatagatggccagttcgtctatgacttcagcagtttttttcagaaattccttctccagttcgcccatggactctccgtcctgaagaagggaggatacagcataataagtgggggtgacagagagtgtaactgcttcggtacctgcagcctttgcaaactggatagcctcttctgcataatgtttcaatcccccgaagtacatcatcatattaccgctgcagaaaagggtagggtccagatggatacagctgatcccttcaattccttttcctttcagaaattccatatagttttctacggatgtgtacttgacagtgacggaacgaacggtgagaggaataccggatcgccctccgaaatcccattttggctcataaggaaattcaatctgccggaatccagctgcatggataagggtataaagttcatcccaatagtactttgattcccgtttgttgcggttaggggcctgatggtgtaaatctacggcttcagcgctaaaactcatgttcataaggttacctcctgaattcaatatttggttaagttgttgccttcctacttgttaagataaaggaaaaagatagtaatgtcaatagttttgtaaaataattaaagaaaagtattaaaaaaagattgacagaaaaaaggaagtattgtaatctagaaataacaagggaggggggatgcagatgtcaccacctggcattaacctgatggaagtccgccatgtgaacaagcacagtgtagtcagggcacttcatgaacagggagcgatgacaaaacaagagatatccagaacactgaatctgagtctggcaactgtagtaacgttaattaaggaattaacggaggaagggattgtggagcagggtgagctgctggcatccacagggggacggaaaccagtggtctatcagatcgtggggaatgccaagctgtctctgggggtagccctcacgggacatcatatccgcatagccctggtcaattggaaacatgaagtcattgaaaaataccgggaaaaaatcacttacagcaattcagaaacctactggagacacgtctatcaggaagtaatgaaggtgctgaaaaaagaacggattaccagccggaatttcgtgggccttaattttgtcattgatggaaatattattccggatgcgggatacgaagatattatacctgtaggtatttttgacggactggatgtatcagtcattaaagatatgtatctgtgccccgtatatttctgcaacagtgtgaaggcagcggcttattccaatgtaggcaagctttcgtccagaaatacttgtgtctatattcagtttgaccgcactgtgggcggggctgtgatcgccaacggaacattctgggggctgtccaaccgaaccggggaattcggccacatgtatttcggagaaaataataagaagtgccagtgcggcaattacggctgccttcagacctactgttccagtgatgtcatccgggaagaaagcggtatggagctggaagactttttcagagagattgagcagggaaataaaaagttgatgtctgtgtggaacagctataaaaaaaatgtaatccaggctgtctacaatctccgggtgatctttgatattaatgtaatgataggcggtgagatggcgccttacctgaaacggtgggaagaggaactcaaagagatcctccgcatgctggacatctatcaggaacaaaaagactatctgcagttcagcaacggaggggagtttgacggcgctatcggcgcagctttgatggttctgcaaaaggaagatgaagacgatattgaatttataaagtaggaggtattatattatgagcagacttttaacacttatgacatgccaatgggcagacatggaactggatgagatttgcaggaaggctaaagagttcggatacgacggtctggagctggcctgctggggacagcatctggatcccaaacgtgcggcagaggatgatgcctacgtggcagaggtcaaagcagtattggaaaaatatgatttaaaatgtgaagctctttgcgcacatatcattggtcagtgcgtgggggactataacgatccccgcctgaataattttgcacctgccgagctggcagataagccggatgagatccgtgcctgggccattgaaactatgaaatactgcgctgtagcggcgaaaaaaatgggctgttatgtggttaccggatttgtgggctcacccatttggaaatatatctattccttcccccagacaacagaggaaatggttgagcagggataccaggagatttatgatctttgggcacctattctggatgtgtttaaagataacgggattaaatttgcgctggaagtacatccgggggagattgcttttgactattactctaccaagaggcttctggagaaattcagagacaggccggagttcgggctgaactttgatcccagccatctcatctggcagggggttacgcctcatcttttcctggaagattttattgacagggtttaccatgtacatatgaaagacgcagccgttactcttaatggaagaaacggacttttgggctcacatattgacttcggggatctgagaagaggctggaatttccgttcccttggccacggtgatgttgactttgagagcataatccgtgtgttgaatgcttatgagtatcagggacctctttcagtcgagtgggaagacagcggcatggagcgtgagtatggggcaaaagaagctgctgcatttgtgagaaagattgatttttgcgcatccgattttgcatttgacagtgctattgcgaattaagcaaaagatgggagggaagtaaaatgagaaaacttagatatggtatggtaggcggaggacctggagcttttatcggaggtgttcacagaaaggcaattgccctggaagagacggcacagttgaccgccggttgcttcagttccagggaagaaaaaaacagagaatgcggagaattttacgggatttcagcagacaggatttatgacgattacatggcaatggcagcgggagagaaggacagggaggataagattgactttgtcagcatagtcacccctaattctacccattatgagatcagcaaggcatttttgcaggctgggatccatgttatgtgcgagaagcctctgtgttttaccacagaacaggcagaagaactgtgtgccattgccagtgagaaaaagctgctttttggggtaatgtatacatactccggttatccaatggttaaactggcaaaaaaattaattgaagaaggagagatcggtgagattgtcaacgtcaatgccgaatatctccaggactggctgatagatgaaatcggcggaggagaccagagtacaaccaaattgtccgtttggcgtacggaccctgccaaatccggtatttccaactgcgttggagatattggaactcatattgaaaatacggtagcctatatgactggactccatcccagacgggtgtgcgcagccctggacaattacggcatggacttggatctaaatgccaacatcctggtggagtacgaaaacggggtccatggaatctacagcagttcacaggtatgtgccggccatctcaacggtctggtggttcgtatcttcggaagcaatggggcaattgagtgggttcaggagaatcccaactatctgaaggtagtaaaaaaaggacagccggatcagatttatcacagggggacaggatacatcacaggaagtgcggcagaactcaatcatatcccatccggacatccggagggcctggtgtttgcagtggcaaatcattatcatggctttatggaggctgtctgcaggatgctggaaggcaatccggaagcagcggcacaggcggactatccaaaggtagaagaaggggctgaaggagtgaaatttgtacatgcagcggtgaaaagctcagattatgatagtatatgggtggatattaaataagtaagcaagttatagaacccgggatatatttgtggatgaagcggagagatacggagcttttatttataataactaatttctatcaaattacaccatggaattgcctgtaccatcttttgtttaacataaggatatttttcctgtggatatatagggctaggatttgggaaatttctaaaaatacttttttccatttaaaatatgcacgctttttgttatgatattattaaaagtgttttagataacactagaaaaaagtgaggtatacatgatggagaaggcggcattggggaaagcgggggagttgtccagagggtttctgtggcgtcagcggattgggttcggaatctcggaactggcgtgcaacatcggctatattttggtgaatacatatctgctgatttattatacggatgtggtgggccttccagcaggcagggtgtcggttctgttcttggcaactaagatatttgatgcggttacggactgcctggtggggcggctgattgaccggacgaataccccagtgggacgcagccgcccctggatgctgggagggatacctgttctgggccttgggatggttctggtatttacatccccggataccggattgacggggaagactctctgggcctgggggacgtacatgatggttacctttggctacactatgattaatatctctatgtcatctattcttccctctctgagtgctgactccggggagagggataagattgttacggcaaaaaccatcttcgcaagcctgggaagtatgattgctgccacattggccagctgcttcctgaaatccctgggagggggcagtcaggcactcgcgtactgcagaaccagcatggcttttgccgcaattgtcagcgtgatcatggcagtcagtgtggcatccatacgggagattaatccacctttgataaatgagaaaaaaagcagtatccggtcagatatgacatatctgggcagaaataagccttacctgcttgttctgccgtatactttttcctggcttctggggtatgtgggaatgtttgcagctatgtcctattattttacgtatattgtaggggatatcactgtgatgggtaaggtgatatcttgtatgactgtaggaaatatggcgggaatggcagtttcaggaagaatcatcagatatttttccaagagagataccgttatggcctgttcggtatttcagaccgtgggctttctgggcgtatggctgggggagggaaccgggctggttatggcagggcttatgctgtacgctgtgtgttacggagtctcccagccgctttactggtcaattactgttgacactatggattacggggaatacctggcaggaaaaagcctggcaggtacccagacggcactgataggctttgtaagcaaggtggcaggtgccctggcaaccgcaggaatcacaggtattctatatctgggcgggtataatggaggcagtttggtacagtcaccggcagctcttgatgctgtccgggtggcttttatcggactgcctgtttttagttttctgggggtttttgttactatgtacttttataaattggggaaagaggagcatgatagtattaagatgatgattgacaggaggagaattgagatttagtggcgtaacctgggtatcgtctcatgggtatccaagacctcctcccttgaccgtccgtctgcgacgatccgctcgccgactaagtaaccccgcgcttcacatacacaaaaccttatctttccagaactgctgttgcaaaagccaccgcatagtccgtatcataagataaagagatcagtatctgtgaaatcccctttgcttccgccagttttttcgcgtttccgtggagggtaacggttggctgtcccagttcgttttccaggatctcgatttcgttgagacggaggctgtttccgtctgcggacagggatttaaaaacggcttctttgccggaaaaccttgtggcgaagctgtacaggggaagggggcggcttgtgattaatgcaagctcgttctccgtatatgtctttctcacaaagggatcggtgatgtccgataccgctttttctatatttcggatattcaggatatctgtacctataccgtagatcatggccgttctcctttcgggggtgctgattcttttggcacctccatttttatgtcaaagtcctcagaggtgaggcgccggtaggtgaggtaattggcgcccacccgcatggtgtttaacaggttgataatctcatgtacggaaagaaactcatcgtcctcagaggtcagccaggttcgggcagccagaaaatgaagttccatgaaaatctttacaaaatattctcgcaggccgtctctgggcatgccgtcatcatccatcatggtattgatatagtcttttaatatcccttttaattttttaacaaagtaggtatccccgttctgaggatccagcagcaccgccatggctttccggttattccggcagaattcgaaccagacatttaaaaacctgggcgggctgtaatcaaatttttcttcaaagcgctccgggggataaaaagttttggggtgttttacaatatcatggtacttctctgtcaaatcgtcgatcagagcgttctctatctgctccattaaatcatagatatcactataatactggtaaaaggtacctcttgtaatatttgctcctgcacagatctcttttactgtaatcttatcccatttcttacaggggacgatagcaagataggtctccatgattcttttttttgtcagttctgatttcgctggtttgctgccggcagatgattcagtcatgtcaattctcctttcccggggcaatgatttaaataaaattctacatatttataagaagtgttcaaattgaacaatgcagccaaaagtgtcatgggatctttggacagaaacacttaaactggagacataacaggttatcccagagaaattatagcacagaaaactttgtcagttcaacaggcatcctggtgacaaacaaagtttcatgcgggagacacgaaaaaggaggatatcaaattggcagagagaattactaaaacagtggatatgtccggggaaccggtggagatctttatgacaaagatgatgaaaccctgcacacccgaagagtatgaggcaatgtccgtggaggaaagggaacatgctaagattcagccgcctatgaaccggcgtgtctattcaccggaggacggaatcatctgtatgcaggatgtaccggtaaaaatgcgggacggagtgactatttacgcagatatttataaaccggaggaggagggaaaatatcccctcgttatctcctggagtttttatggaaaaaggccttttgacgggcagtctgaatggcagatcatgggggtgcctccccagaccgtatcggatatgtctaagtttgaaagcccggatccagggttctggtgcaggagagggtatgcggtggccaatgtagatctccgggggatcggccattcagagggagattttgtacagtttggaacccaggacggaaaggatgggtatgattttattgagtgggcagcccaacaggaatggtgcaatggcagatgtgcactgtcaggcaacagctgtgttgccatgacacagtggagaatcgcctcacaatgcccgccccacctggcctgcatagcgccctgggagtccaccacggatatgtaccgggaatctctggctgaaggcggaattcctgcccacacttttgtgcgtctggtgatgcaggaggcctgcggacccaactatatggacagtatgccggacaatctggagaaatacccttacatcaactgtgcctactggaaggataagaacccggcttttgaacatgtcacaattccggtataccaggcagcctgctggaatcatttccatctgagggggtccatcaatgctttccgcaagtgcaaatccagaaagaaatggctgagggtgcacagaaattttgagtggccggatgcctatagctatgaaaatctggaggagctggagcgcttttttgcccgttacctgaagctggagaggaatggatgggaacttacccccaaggtgagaatcgaggtacaggatacaggagaatttaattatatgactaaccggccggaagagaactttcctctgaagcggaccaaatatgaaaagctgtatctggatgcagcggatatgagtatgaaaaaagaaccggtggaaggggaagcaaaagcggcttatgacagcgcagaagaagagatcacatttgactacaggtttgaggaagatacggaactcaccggatatatgaagcttcgcctgtatgtggctgccgaaagctacaacgatatggacttgtttatcaatgtccagaaattaagtaccgacggaaccttccttcccatcaccctcttcggggaaccccatccgggtgtctgggggaagatgagagtctcccgaaggaagctggacgagaagctgtctaccgattactgtccggtgcaggcccatacctgcgaggaaaagctggaaccaggtcaaattgtcccggtggatattgagcttgtacccaccagccgcttctggcacaaaggccagcagatacgggtgcagattgccggacgttatatccgtgaggattggtttgaacctcttacctgggacacggacaataaaggaagacacattgtgtatacaggaggcaggtatgaatccttcctgcagataccagtggttcccccaagatttcaggacggagatataatcattcgctaagaacacaaaaagaacaggagtgaaaaaatgagagaagaaattttagccaaaatcatagaaaaagccagcagtatctggaacgcagatcccgcatctttaaatgaaaacacagaatttgcatccatgaatccaaaatcagcccattattcccagcttaccacatttctggaggatgagtttgacgcggaagtgccgtatatgaacttcaaacgctgcaaaacctttggggaggcggcagactatgtcgcagaactgctggatgaataaaggtactgtgtcattacaagggaggaccgggagacagatatgaatgaatttattcgcaggatgacagaaaaggcaaaagccgcccctggaagaatcgtatttccggaggcattaaatccagatattttgaggactgctgaattggcagtccggacaggtatcggctttccgataatgctgggggtaagagaacagatagaaaatgctgcggcacagtggggcgtatccacggaaggatttgactattatgactgcagcagtgaagaaaaccgcagagaactggcagaagaatacacggccgtatacgaagacttttctgaaaaggctgtgttcaggaaagcaaaggatccggtgcgggcggcgatgtttcttctgaagctgcagaaggcagactgtgcggcagctggtaaggagtattccacaggagatgtggtatttgaagctatgagtattgtagggcttcaggaaggggtagaaagtccatccagtctgggaatcgcggatattccaggtttttggggaccggagggaacgatgctgggactggcggattgtgccataacagcccagccggatgcaaaggatctggccggaattgccatatcgtctgcggagacggcaaaagctctgctgggatgggaaccgagagtggcgctgctgtccttttccacctgcggcagttccgagcacgaaagcctggaggtggtccgcaaggcagtagggattgtgcgcagactgcggccggaacttaaagttgacggagaatttcagctggactccgcgatcctaccggaagtggcggcaaaaaaagtgaaatgggagagtgaagtggccggaaaggctaatatcctcatatttcccaatctccatgcgggaaatatcggagtaaaactgattcagatattcggccatgccaatgcctacggaccggtgcttcaggggtttgcacggccggtctgcgacttttccagaagcgctccggtggaggaaatgctggggaatctggcgatgctggtgatccgtgcggcttctcagaaaggggactgctgatgaaaacatataaaatatttacagtaaatcccggctctacttccactaaaatagcattattccagggggatgaaaaaattttctccgccaatgtgagccacgatgcaaagatcctggaaaaatatgaaacattgggggaacagatggggtaccgcaaggagaccattgaagaactcttaagggagaaccgggtggaattagacggccttgacgcatgtgtaggtcggggaggaggccttctggcaatggaagggggtacttacagaatcgatgaactggtgctgaagcattccctgaactgtgccaatggggtcctgcatccggcctgcctggggcccagcattgcaaaggaactgacagaccgctacggcggagaggcttttgtggtaaatccccctgatgtggatgaactgcaggatttggccagaatgacgggcataaaaggcgtctttcgggtcatccatctccacgcgctaaacctgaaggagacggccatccgccatgctgaacacctaggaaaaccatatgcagactgcaattttatagtctgccatatcggaggaggtatctctgtttctgcccatagaaaaggcaggatggtggatgggtttgacattgtagggggagaaggccccatggcccctaccagatgcggaagcattggggcagcggaactgcttgagtactgtaaaggaaaagacctaaaagaggtaaaaaaactttgtaccaacagcgggggatttgtcagccatatgggcatctcagatgccctggaactgacgaaacgggcggcagacggggaccgttacgcagagatgctctggaatactatgatttaccagatcagcaaatgcatcggggccatggccgcagttctccacggcaggatagacggtatccttctggggggcggtatggtgtataacgaagatctggtaggccagatcagagaagcctgcggatggatagcaccagtgacggcctacccgggggaatttgaaatggaagctatggcggccggtgccgcccgtgtgctggatggaaaagaagaggcaaaaaaataccggggagtgtgcatctttcagggttttgatttttcagacacaccggagagtactggaatattaggaggaatgaaaaatggcgtttgaattttttgtaaatagtgacattgtcttcggacgggattccatttataagctgccggatatcttaaaagagtacggagcaaaaaaagtaatgcttgtatatgacagcggtgtaaaagcagcagggattgcagagacagtgacagccgctgtacataaggctgaggttgaaacagtgattttcgataaggtaatccccaatcccaccaatgagactgtggaagaggcagcggcaattgcccgggcggcaggagtggatgtgtttgtggcggttggcggcggcagcagcattgatcttgcgaaggccattaatgtgctgatgacgaatcccggtcccatcgggcagtacggggggataggtcttgtgaaatatccggtgcttccgctaattgctgttcccactacagcgggaacctccagtgaaatcaccaatgtctgtgctctgatcgacactgaaaaagtagtgaaatacgtggtgattgacaataaaattgtgccatccaaagtgattattgatccggaattcacaaaaaccatgccggcatctgtcacggcggctaccggtatggatgccattactcatgcagtagagagttatatttccaatatggcaacccctctgaccgggtacaattctctgaaaggactgaaaatactctatgataaccttcccagggcggtaaaggacggctctgatatggaggccagggagcagatgatgctgggctgcgtgattacaggcttcgggttttccaacgcgaacctggggctggttcacgggattgcccatacactaagcgcacactttaaattggcacacgggatggcaaatgccacagtactgccttatgtcattgcttttaacgcggaaagctgcccggaaaaaatggcagatatggcagaaaccatcggcctgaaactaagtgggaatctggaaaaggataagtatcttgtctcagaagaactcctggccctgaccaggaaactgggaatcaaaacgctgtcggaacaggggatccgggaacaggatctggagatgctggcggaagaagtcctccatgaaccggtattgggatttaatccccggcagggagtgacaaaggaacaggttctggaaatccttcacaaagccttttagacatacaggataaaaatgactgcagcagaggaagaaaggaaaaagaaattgagcaaagggaaaaaaattaagattattactgccattgtgtgcatctcctttacccaggggcttcagtattcggtatcccctgtgctggggcagattcagaatcattttccggaagtaaatgtaagcctgatccagatgctcatcacaggtccggctctgcttgccatggctgtggcaattctatccggatggcttgttgttaaaatcagtaagaaaaagctgctgattttcggcagcctggtagcgggaattacaggatttgtgccatttctgtcagacagttttgcgctgctgtttatctgccgtatcctcttcggcataggacttggcctggccactgcccttaatactgcggtggtggcagagtttttccagggggaggaacgggtatctgtgatgggaatacaggcggccagcgtgggagccggaatggtggtgataaccacccttgggggaatccttggaaaatttggttttgccaatgcctatgccacacatacgattgggtttattgccatgattcttattgcagctatgctgccagagacggggacagccaaaacctcaggtacagaaaaaatcaggctgaaccgcaaagtgttccagatttctttgctgggatttctggagtttctttttttgattacatttacgacaaatattgccatgcacatcagcggagcccttgggggagacaccggagtatcgggaacccttaccggaatattttccggggcgcagattgtaatggggatggtactgggcagaattaccagggtgactaaatcaggtaccctgccggctgcaatggcaagctttgcagtgggggcggctattttggtggtatttccggaccagtttgtgatgcttatggcaggggctgtattctgcggattctcacagggaatgtttattcctactgccatggtggaggtggcaaatgcagtccccccggttgccacagctatggcatccgcctgttttacctgttttatgtgtatcggacagatgatttccccagcagtattgaacaccctttctggggtgatttttaaagatgtaaccactggacatgtatatatcatagccgcagcaggcatggcggtatcagctgctttggcggcggtgataaaaacaggacaggcaaataaacagccggtgctcccaaaagagtgacggacttttcaataaatggaggatggaaaaatgaagaaaaaaatggcattgtgtacgccgattcccgagaaacagctgggggtgattaaagaacagtgtgaagtgaccatatgcggagaattaaggcacggcaaaggaaatgcaacggaagaacagacaaaagaggaatgtctgggaaatgagattattattctgggagacgaaacagcgggacgggacacgattggcgcatgggcagaacagggaatgaaattcatgggcgtggcaaaggggacaccggcaactgtggattggggcgccattgcggaagcgggactggaactgtcttatacaccggggagaaaccgggttgcagttgcggaatttaccatgggcctgatgattgccgcagccaggaacctggctcttagcagcacaggactgcaaaagggagagcacctgggggcaccggcggaagatgtatacaaagttccggatgtgaaaaatgtaatctggggaccattggatgagaatcatccttttaccgactatggcattggatttgaattgtatggaaaaacccttggaattgcaggatacggagccatcggaagagaagtggcagtgagagctatggcatttggaatggaagtgattgcctacgatccttactgtcccggagagaaaatagaggcagacggagccagggctgtagatttggataccctgttagctaacagcgatatgctaagcatccatctgcccgtactgccttctaccaaaggaatggtagaccagacatggttttccagaatgaaacccacggcttatgtgatcaatacggcgagagccgcagtcatccaccagcgggattttgtggaggcacttcagaacaaaaccatagcaggggctgccattgacgtatactggcaagaacccattcccgccaatcatcccctgctctccatgagaaatgtgacattgacgccccatatggccgggcttaccacagatgtggatcaatggtcaggtaccatgatgggggaagaagtgattgcttatctggagggcaaaccgagaaaatatatctggaaagtacaaaaataggaggagaatttatggataaaatgtgttgtaaaaaaggtgaggcgtatcctcatttgttttctcccctcaggatcggtaatatccgcctgaagaaccggatcatagctgcccctacaagcccgagtatgattacagcggaagggcattttacgccggagatgacagcctatctggaagaaaaggctatgggaggcgtcagtgtggttacctatggagaggccatcgtacattcagccacaggaaaatctcacaataagcagctgcagctggattccttcggagtgaaacagggaatggctcagacggcaagagctatacataatgcaggtgcctatgccaatattcagctgtcccacgggggaaaatacggaggtcttgccagtgtgggaggagatcaggatacctgtgaggtggcctacggacccagccatgagataacccctcagggagaggtgcacgagatgccggagtctgtgattctggagattatagaatcctataaaacagcggcaaaactctgcagagactgcgggtttgatatggtacaggtccatgccgcccatggatggctgttttcccagtttttgtccccggttatgaaccggaggacagaccaatatggaggaagtctggagaaccgggccaggtttctgctcatggcactggacgcagtgagggaaggagtgggaccgagatttcccattgaggtgcgcctgtcaggggatgatctgacagaggccgggttgaatctggatgaatgcatccaggtagcagggatgattgatgacaaagtagatttgtttaacatttcctgcgggaatcatgaggatcccgcgctgttttgccgtacccacccctcggctttctatcccaggggggtgaatgtctatctggcagctgagattaaaaagcatgtaaaaaaaccggttgcctgtgttggatccctgaatgaccctgcccagatggaggagattattgccagcgggcaggcagatcttgtagagattgggcgggcactcctggcagacccttatctgccggaaaaagcccggaagggacaggcagaggacattactccatgcctgcgctgctatgaatgctttggggagaccagcaaaagcgagacagtaaagtgtacggtaaatcccactatggggcagcaaatctcagaaaaattccctgaaaaggcaccggaatacaggaagaggattctggtggcaggaggaggccctgccggaatggaggcagccataacagcagccaaaagaggacatgaggtgacactggctgaaaagtctgaccgtctgggaggaaatctgcatcctgcgggttctgctttttttaaggaagatatccggaaattttgtgatgttatgattcgaagaaccaggcaggccggagtgaaagttctgcttaataccgaagtgacagaagcgtacatcaaagaattctccccggatgctttgttcgttgccataggctctgaagaactggtacctcccattcaggggatggatctgccccatgtgcggatggctgtggacgcagagcttcatccggagaagcttgggaaaaaggttgtgattatgggcggaggccttgtgggaagtgaggcagcggtatctttctcccgggagggcagagattgtacgattgtagagatgaagccggaggttgcggaagaagtgaactctttttaccggggtggactgctgcctgagattgagaaggctgccgcagtttatgtgaatacgaaggtaaaaaagattatacctgggggagttgtctgtgaaaaagacgggaaagaactgatactggaggcagattccgtagtctgcgccctgggattcagggctccctatggccgggtggatgccttttgcagtctggtggaggaagcttatattatcggagactgcagcaatgtgggccagatttaccaggcggtgaatgcagcctattatgcggcaaagagagtgtagcaggcgatggaactgtaacatgaggctcctgcagtatcacgcattggtgactgcaggaggccgggaaaggtgacgaatgcagttacggaatatgctccatggtttctttcagcctgcgcagactgccgtccagatcctgatacatcccaacatagtatggatacagcttgtcataaacgttggcccactcttcctcaggctgaatcatttcctttactttaatgatcttttgaatggtatccgtaagatttggaaatacgcctacggcattgcctgcaatcaatgtatctccaaaaggtacatctccggatttttcgtccagcagatacaccggcatacgcagcatagaggcttttatctgtgaccatactttacttttggccccgcctcccgtgattctcagacatctggcgcctgcaccggcttcctggatggtagtcatgacatggcgcagagcaaaagcagtgccttccataacggaacggatgatatcctctcttccggtatacaaagacaggccgataaacattcccctggcgtgggaattccagaggggggcacgctctcccagaagatagggaaaatagagaagaccgttgcttcccgccggggcttctgctgcccgttgattgaggtactcgtatacgttgatatggtgtttccgggcatagtcggtttccggctgtcccagggtatccagaaaccatttcagagaggcaccgctggtattgatgggggcgtcgaagatataagggatcccgctgatggaacagggctttgtgacaatagggagatccggggcactggccttttgggcgcccacaaagacaagagaggttgtgcctgaggattccccggcctctccaagctggcttaagccggtagcatacatggaggccatggcatcactggctccggctgctacgggggttccgctgagtaatccggtgacacgtgccgcctcttctgtaacagtgcctataatttcattgaccggaacaggacgggggagaatctggttcagatctgtaccgatgacctgagatatttcatcggaccatgttaatgtatgaatatccaggcactggcaccttgcggcctgatccatatccatggtcatttttccggtcagcttataattgatgtaagagcttgcctgaagtatcttatgggttctggcaaataagtccggctcgtgttttttaaaccacagaatcttatttgggagaaaggccacatcaggctgtgcgccaatgatagatacataacggtcaaaaccaatggcatttataaggtagttcagttcattggcagaacggttatccatccagatcatggcgtgcctcagtatgtttccttcttgatccagaggaagcagagtaacggtctgggagctgacagagatccccctgattctggcagtaatatccggacctgcctgctgcgtgacggactgcaagattttcactgcattttcccaccaaaggccggggtcctgttccgtcatatccggtccgggaaactccagcgcattggcctcctgtgcggacgctgccacatttccctcctcatccataataatagcttttatatttgttgttcccaaatccattcccagcagataatttttggtattggtcataggtttttccctcctcagcttgttttgttacatcttactaaaaacacgcgggaagagcaaaaaaggttttgccgtttccaagcggcaaatccctttttgaatctgcaggaataatttcttacactggatacagcaaggaaacacaatgacaggaaaggagaatttcagtatgaaaatgaaggcagcggtaatgtatgggccaaatgatatccgggtggagatgacagaaaaaccagaatgtcctggggatggcctgattcttaaaattatggcagtaggcctgtgcggctcagacatccggaatttaactacagattccagaaaggggaactatccctttatctacggacatgagattgttggaattgtagatgaggcgggaccccaggaaacaaaatataaagtaggtgacaggctgttcttgtttccggggacatactgtatggagtgtgatgactgcatcagcggccacagcgagaactgctctgataaagaagtgggatcactggcaggtaccgggggatttgcccagtatgtggcggtaaaaggagaaaaaatccgccgtggaggtatctatgagattcctgagaatgttacctttgaggcggcaagtctgggggagccgctaacttctgtatttgcatgcctggaaaatatacaggcaggttatccggacatcatggcaattatcggggcaggacctattgggtgctttatggcacagcttgccaagattcggggggctgccaaggtgattatgattgaccttaatgataaccgcctgaataaggccaaagagttcggcgtagatttcactgtaaacagcacgaaggaggagcctataaaagcagtaatggagctgaccgcaggcagaggggctgataaagtgatatctgccacacctgccaacgctacccaggcccagagtatccatatggtaaaaaagggcgggcttgcagtgtttttcggcggggtgcccaaaggctctctgactgaactggacggtaacttgatccactacaacaatatctggatcaaaggtcatttcggggcctcctacagtcagtcaaagcgtgcctttcagcttgcggtttctccggtatttcccacggaaaaattcataacccacaggctgcctctggataagatccaggaaggtatccggctgaccagaaccggggaggcgattaaagtagtactgcttccccaagaatagaagttgttttttacataagaattcatgggaagtaaaattcgtgttacaattataataacagagttattcatctgactagagcgcagcaggcaggataggggggcgcaggatggaaggattggtattgcctgcacggcataaaaagctgctgcttttcctgaacggacggcacggtatcgtgacaggaaaggaactggcagaaagactggaattatcagagagaaccgtaaggagtgatattcagcagatgaacaagtctctggtgcaatacgggatacaggtaaaggcgcttcacgggaagggatatctgctgaaaatccataacagggaagtatttcacagtcttttttcggaaaaggacagccttcagaccagagaggaccggatccgcagcttgatccgcagattcgcaaaaagcggggatttttgggagctctgtgacctggaagaggagttctacgttagcagaacaacactggagagtgatcttaaggaaatcaagtcaagaattacggatcatcagccatttcttaaaatggagagaaaaggaacccttatccggtttgaggaggatgagatcaaacgcagaaatatcctgattcacctctactgtgaaaactgggactatgattccagggaaggggttatgctgagagaggatggaatagagtctgatgttctggagcagatccgtctgatggtgaaggatatcctcaaaaagtataagattgccctggacgacttcgggttgatttatatgaccatggcaattgccgtatgttatgtaaggattcttgaggataagccgttgtatctgaaggacgtagagtattcctgtgaggatctgtgcccgaaagcagcggtccgggaactactggacggtctctccgcagcctgggagctctctgtagaagagggggaagctgcctggctgtcaaatatcctggaccagcttagtattctgaattttcacaggaaatctatagaagaagtccaggcaaagacccacccggcaagcagccaagcattggggacggttctgctcgaaatcagggagcactgcggctgggatttaagcagagatgaaaggttctgcggggatatgctgttccatatggaggcgctggtaaacgggctgatctctgtacagccccagacccggtatctgttgaatgaaatgcgtataaattaccccttcctggggactgtagcagccggtctgtgtacacgtctggagaacttctgcggggttaaacttgggccggaggaagaaaattatctgctccctctgcttgtaagtgcccggaaccggtatctggaatcacagaacagcagaagaattaaggcggctgtggtaagccatctgaattttggtctgacatattatctcacagagcaaattcggcggcagttcgggaacagagttaagcttttaggcccttatcccgtgtatgacagggaagagatggaggcagaatgtccgtcatttattatcacaaccgtgcagatggatgtattccgggaatttgaagtgcccgtggttacggtatctccggctttggagagacaagagcaggaacaaatccagtgctgtatttccaaagcggaggatgactgtatgtatgcgaagcttcccagaccacgttccgcttatttccgcagtgagcttatgctggagattgattacaaaatggagctggacgcagtcctgagcttgatagaggaaaatctgcagtgctgtctctacacagatcctgagtggaagtttacctgggaggagaggaacatttcagtcttaaagcatggagtgctttttgcccacacttttggctcatcatcacaggataccttgttctgcgcggcagatctgaactatatgcttacctggaaaaagttccggaatataaaaaaagtactggttcttatattaaacagggaagagcgggaatatctgggaagtttttaccgggttgcagaggatattgcggaacatacagacaaagggatggagcgggccgataaaggggcagttccctaaagcagcaatatgttttccgcacagagaatgaaaaaacagaggaaaggaaattgagattatgaagtatgaaactattaggaaacaagtattagaggcaattctggatgcagtggaacaggggctgatcaaaggcacctctggaaatattgccatgagggacgaaacagaggatgttgtggcaattactcccagtggtattccctacaaaggaatgcagccggaggatatcgctattgtagacttgaacggcaaatggctggaaggaaactacaagccatcctcggaggtacctatgcatacagcagtaatgcgtgccagaccagatgtaagggcaacggtacatacccatggaatgtttgcaacaatcatggccatgggagagggggaactgcttccggttacccctcctcagtgtgaatttgctccagtgcgaaaagttccttttacaatgccagggagcaatgaagtggcagaaagggtagtggaagcactgggaaaagacggacgttctgtacttatgaaaaatcatggaatgttctgctgcggcaaagatatgaaggcagccatggcggcaaccatctatacagaagaaatggctacaactgcatattatgcaaacgtcctcggtaattttgaaccgatgccggaggatggggtgcgtaagatgaaagagctgattgctgcggatcaggctgtgtaaggaaataaaagagctctgccctctgggcgctatctgtgttagcgccaggtttccaggctgtgttcagctttttgttcccggatcccgtgctgaagcggtaaggaagacagggagaatggtaaatgttttaggattggaggaataggatggacgatggaattcaatatatatcttatcatcttttggccgatccggtgagggtaaattgttatctgctatatacaccggatagtaaagaggcacttgtcattgatccggggggagaaccggagcgaatccggagagagttgcagatgcatggcctgaagctgaaatatattctgctcactcatgggcattttgaccatataggaggcgcggcaaagcttagggaggaaacaggagccaggatttgtatgagtcctctggatgcacaattcattacggattcccgatggaacgcagctgaactggttcacaggtctccggttccggtctttcctctggaaatccccctgaaggaccatgatgccctgtatcttggaactcaggcggtaaggattctgaccacaccgggacataccccgggaggactatctgcctgtattccggggcatttattctgcggagacaccattctcaagggagagataggacgcagtgatcttccgggggcagatgtgcctcaatcaaaagaaagtatcagaaaaaagatatttacacttccggaggatacagtaatccactgtggtcacggagaggagacatccgtggcatatgaaaaaaagaataaccgtattgtatgtcaggagtagaaaagaagaagcctgcaacctaagatgcctatgagaatgctgaagtatataaggaagaaaagcactgccgccccagggacgaaagtatccctggggcggcagtttttataactattaattataacacagtaactgacaaaataatagtacctgttgagataatatatctttctacatttgagtaatatctccgcaaaatgaattcaagtaaaataaaaatatagggattgggcagcgataaaacacacgttaaccggccgcagttaacgttaggaaaggaggaatctgaatggaattaacagaaaaaatgatactcggattgacgcaaatgagcacccaggatacacgcagtctgcaggagattttctgtacagatctgaaagggagggtggccatagttacaggcggagccaccggacttggctattgtgtggcaaatcgcctgtcggagggcggggcatctgtgatcatcgcttcccggaacgaagtcagagggaaaaaggcggaagaggagttccgggcaaaaggacgggaggtaatctggtgccggacggatgtgacaaaggtagccgactgttataaaaccgtggactttgctgtggaaaagtacgggagggtagatattgtcgtagctaatgctgctacctggtctatgtattccttccttgacatgccggaggaagccttcgatcatgtcataaacacagatttaaagggagagtattttattgcccaggcagctgcccgtgttatggtgcgtcagaaaatcagagggaagattgtatttatcgcctctgtggcgcataagggatccgacactcctaaaatcggtatgatgacccattacaatgcggctaagggggcagtggtcagcctgactaagggggtcgccaaggagctgcaccaatacgggatcagtgtcaactgcgttgctccaggcgggatgacaacatacggtgccgtcagcaattcctccgaggcatttgagctgtatggccaggagctggcggcagatcggatgcagtacggggcagaggtacccgtggcatccagtccggatcaggttgcactggtggtattggccatgtgtacagcaatgtctgactatgtggtgggagagactattgatgtggacggcggatctcttatgagcttccagcagaagccctggagttatcacgtagagggctgtatacctggtccgaaagcagaatagttccggtccttacaggtgttcgtttctttaccggaagatgcggggaaagaaattggaatacggaacatgaggcaaagcaaattcaaatgtgaaaggggaacagtgacatggaagaaaacaaagtagtagtttctgaggaagaacagaaagaagcccagaagggtattcatatgtctacggtgaggaaatccagaaaaaatctcgcttatttgcagaaaaagaaggataaaggggaaaagattgtccagatgtgcccggcagccctgggtcctatgtttgcaatggcggcggaggttgccgactgtgatattctccgcactccatcatggttttccggtacgcagcaggaggctattgacagcgcaattcccaccattaaatcttaccgggcggtagcacagagactccatattaatttctatatgcccacgcctacgtatgcgtcaaaggaaaaggctctttcctatggctctgattatgtggttgcgggggcggactctatgctgcctatgggaatcagcaatgagacgctgcgctatatgacagataattatgttcctgtatacggccatatcggggcaatctcgggatggcagaccaatgccaccggctactcaaagctgggtaagactgcagaggatgccctgagagttttcaagatgggatatgaatatcaggaaaatgggatgggcggaatgactgttgagctgacgcccatagaggtcagcgctgccatagcaaagaaactgcgcgttcctgtagtgtctatcgccggtggtgcggcatgcgacggttctgagatggtagatatggataccttcggaatgatgccgtctgcagcatctcatgcaaaaacctatgcgaacttcatggaatttgcagccaccgcatatgctatgtgggcgaatgatgtgcgcacaggggcatatccggaagacaaacatggctggcatatggatcctgaggaattggataagtttatgaacgcattagaaaaattttaatcccaggacaaacaccccagggcaggcctacagccgtctgccctggggacttctatcctaaaagccgggcaagcagttccctctgggaagacacatgtagcttggtgtagatgtgtgagatgtgcttttgcacagttgcccgggtgacacttagggtcctgctgatgtgagcaggcgacataccattgcacagcagggttgcaatctctatttctctgggggtgagctttgtagacttccagtctatcttgctgatatctgtatcctgcatctgatagctgaagaaatttttgtacatatttttaaactggggaactgccagtttgataaatgcaatctctgacggcagaaagttttcattcgttgtcttatcaagacaggacagaactcttacgtgcccgttcaggtcctgaaaagcatagcccaaagtataggtgagcccccggggacgtataaaatcagggataaattcttttgcgctctcatccttccaggtcacaagggaaatctcggaatctgcctcattatttatgtagggggtgtaaatggagtaccgcttgttttccggcaattttgaataatactccaggtagagggtagaccagtggctgtccgtattgaacaaatactgatcataaaccttcccgttagagtcaaaaaagtagatgagtcctttgtcaaagctgcagtactcccgcagaccagtcataatctcaatggcaaactgcctctgctcatggaagcttccgcaatgcagacagaaatcatatagctcacgccaggggatcttgatatcgttcatgtcatcctcctctttacaaataagtgagtgagttcctaatgatactcttatgcggggaaagtaatggtgcactttttttaaatataaagttatttgagagaaatgtcaatatagtccttattcttgaaacatggggaaattggctatcatttttattaacatgcagaggggggatagagcttgggatgctcagactatgtaaaagaacttaagtatttgcagataaggctggatcaaagcaatatggatgaaccgcaaattaaagaggctcttttggaaaaggccgcagaacaaagtaccatcgacgtgccggaggatcaggtggaaagggaatacaccgctctggtccaggccgcgaaacaaaaaatccggtatgagtacatggctgagggaaaaccgttttatggattcccggagtctctttacaccgctctggagtctcttcgtgcggaggcatattgttctgtaaagacagaattgctgctccaggctgttattgaagcggaacacctggaaatctcccgggaagagctggagagagaagggctggcttctgcaaaaagactggaagtcacacctgagatggcccggatgttttatggcgatgattacggacttcttaaaaatgatctcctgaggcgaaaggcgatagacttgatttatgagcatgctgttctggtctgaacaggggatactgagggaggaggatacaatggcaaaaacaataacacatggtagaaatgcattggagaagcttgccgccggagtagacaaactggccaacacggtaaaagtaacgctgggtcccaaagggcggaatgttctgatcggtaaggaaccgtccggctggctgataaccaatgacggtgccgcaatcgcggaggcagtagagcttcccgacccttttgagaatatgggtgcgcagattataaaacaggcagccctaaagacgaaagagggtgcgggagacgggactaccacaaccattgtcctggcccaatatattgtccatgaaagcctaaaaaacatagcagcgggtgccaaccccatagaactgagaaagggaattcaggcagctgcagaccttgtggcagaggaaatagaaaaagcggctgtgcccgtggaggataaagcggcaatggcccgggtagctgcagtcgcctgtcaggatcccgcgatgggcagcatgatcgcagacgccatggagcaaatagggaaatacggggtcatcaccgtctccgagggcagtaaactggagacagtcctgaccgtcgctcagggaatgcagttcagccgccgactggtgacaaacagttttttaaaagaaggagaaatgcaaatccgtttggaacatccgcttcttctgcttaccgattatgaaatatgggagattgaggatttggtacctattttggaggaggtgctgaatctggaggagccccggccgctgctaatccttgctgaaaagcttgggggagaggcactggacaccctaatattaaaccgggcaaaggggatcctggatgtggcggccgtcatgcctccggaatatggagagggacgtcaggaaaccatggaggatatagcggtattgaccgggggaaccgtaattacgaaatcctcctataaaatagaggaaacaaccctggatatgctgggaagcgctgactcagtcaccatagattcacagaaaaccgtgatcgccggcggtggcggcagcaaagagagaattcaattccgcatcaatgagcttcggatgagagcggaagatacagcgtatgcatttaaaagagagcgatataaggaacgcctggcccggttcgtcgggggaattgcccttattgatgcggggggaaccacagaagtggagatgaaagaacgcaagatgcggattgacgatgccgtgaatgcggcaaaggcagcggcggcaaaaggaattataccaggcggaggctgtgttttagttaaatccatcccacacgtgaaggtatttgctgaaacgctggaaggtgaccaaagaaccggtgcccatatcatgagtcgggccctggaggggcctctgcggctgattgccgaaaacgccggatttcacggaacagaggttctggcaaaggtaaaaacccttccggcagcatacgggtttgacgcagatacaggagagtacagagatttggcggaggcgggaattatagatccggccaaagtcactgtatcggctcttaagtgtgccgtatccgcagcctcaacgcttttgactaccggggcgtcaacccacctatttccgtcaggtaaattccccgagcattcgccggacgaatcctccccgtaaccttacgtttgctgatttgtctgattttgcacaaagaaaagagtccagtattctcagtgaatactggacttcatactgccggcaatgggacttgaacccatacgtggttgcccacaacagattttgagtctgcctcgtctgccattccgacacgccggcatgttcattccgaaccgaaaataattgtaccatattctaacatgatctgcaaggggaaatttagctttttttctgcccccgactccaaggtctcctcccttaaccgtccgacgacgactctccccgcagcctatttcacaccgaacttcacatatacaagtcactaatttcttaacgcatacttcacacatctccccccagtagaatgttataatttagaaaaatcaattcttaatagagaaggagtgaaatcttatgaagcagaggggaaattacaggttcctgctgctcttttttgcggctttttgtctcttgcttgggggatgcaggatgacagaaaaaaaggagatagcatttgccgatgtgggatgggacagtgtgcgattccacaatgcagtggcaggactgattgcagagtctgcttatgggtatacctggacggagacgccggggtctacgccgattatgcatgaggctctgaaaaagggcgagattgatgtgagcatggaagagtggacagataatatctcttcctatgaaaaggacttaaaagcgggaacatttcaggagttaggatccaattacgatgatgataaacaagggttctatgtgcccagatacgtaattgagggggatccctccagagggatcaaagccgctgctcctgatttgaagacggtacaggatttggaaaagtatgcggatgtttttacagatcaggagaatccaggcaagggaaggatttatgggggaatcccgggatgggacatcaatgagactatgagaaaaaaggtaagctataatggcctggacagcttatataattattttcagccgggctcggattctgcattatctgcagcctttacctctgcctatgaaaaaggagaaccgatcgtgggatattactgggaacctacgtggctgacgggaaaatgtgacctggtactgctggaggacaaaacatacgtggatgaggagcagtttcgggaggggaagacagagtgccctgcagtaaatgttaccatagcggtgagcaatgcatttgcacagtcaaatccggaattctgcagtttccttgagaattatcacacttccagcaaattaaccagcgaggctctggctcatatgcaggagacgggggatgactatactgctgcggcaaaatggttcctcacagaacacgaagatctgattgaacagtggctgccggacaaagagaaggctgatacggtaaaaggagcattggggcttcaaaaagttcaaaaaaactatttgttggagtttccctttgagcttccggtacataccgatgactttgacagtgctgtaaaggcctttgccgcacacttcagtgggtttttcaatgggatccgggatggactggatgggatgattggaggaattcacgggcttctgggactgattccctggtggcttatgatttttctcgtcttcttaggaggatggaagatcggcggaaaagtaaaaacgggaattctctatagtatacttcttttcattgtaggaatgatagggctgtggtcaatgatgtatgagacactggcgattgtgattgcatcggtagttatttcactggcggcaggacttcctatcggcattcttatctcaggcagtgacagggcgaaccgaatcctgcgtccgatcttagacacgatgcagaccatgcctgtgtttgtttatctcataccggcggttctgtttttcggtctgggcagagcaccggcggtcattgctaccacagtgtacgcagtagtgcctgtaatacgccttaccagccacgggatccgccaggtagaaccggaggtggtggaggctgccaggtcttttggatctacctggctgcagtgtctgtggaaagtacagattccacaggcaatgcctaccattcttaccggtgtcaaccagacactgatgatggccatgtccatggtagttacctgctctatgattggagcctccggtctggggatggaagtactcatcagtgtgaaccggatcgagataggaagaggattgttggcaggtattgcagtagtaatcgtagccatactcatggatcgtatgacccagggatgtctgaagaaaggggaggaggagagaaatggaaaataaggctgaacagaacacagagcacatgctccaaataaggcacctgacaaaattctacggcatgaataaaacagaggcgttcaggttggctgagagaggagaagggaagagcagtatctatgagaagactggggttaccctggggctttgggacgtgaattttgaagtacgaaaaggggagattttcgtcattatcgggctttcgggatgcggaaaatccacactggtgcgcatgattaatcttctccaccgccctaccagcggtgaaatcatttttaacggaagaaatatagctggcttcggtaaaagggagcttttggactaccggagagaaaagatctctatggtatttcagaattttgggctaatgtcccacagagatgtgctgggaaatgtggcatatggactggagacgagaggtatgtcaaagagtaagagggaagagacagcggcagatatgatacagctggtaggactcaagggacaggaacatacacccattcagagcctgtccggaggaatgaaacagagggtggggatcgccagggctttggccaatgatccggagattctgctcatggatgaaccgttttccgctctggatcctttggtgcggaaggatatgcagtttgagcttttgtctctgcagaggaagctgcagaaaacagtggtttttattactcatgatattaatgaggcatttaagctgggtgacagggtggctattatgcgggacggaaggctggtacaggtgggaactccggaaaagatgagcgcagaacctgccgatgattatgtaaaggaatttgttgagagtgcggataaagcaaaggtgctgacagtggggcatgtgatggcagtaccctcctgtgtggtgagcaagagagacagtctggattttgccatttacctcatgcaaagggaggggaattctactgcctatctggtagacgaggaagagcggctgaaaggtatccttacgatcgaggcggcagtcagaggaaggcagaggcaccagtctttggaagaaatacagtggcaggaggcgaagacaacaaccgcagatactacggtgagagatattcttcctgtggcggcacgcacccgatacccaattgcagtggtagatcctgtggggcatctggaaggaattcttactaaagcggctgtgctgtcctctcttgcttaaagggaattaccaggaattgcttgtttctattgtggttagactgtgctaatataatggatgtaataaaaatgtaatatttacataatcaatatgtaatacaaggaggacaacatgtttaaacattcattatctgttttagcaactgtaatagctgtagcgggaagcagtttacctgtatacgcttccggcgcagaagatgtgatatcccagcagaccaatgggaagggtgtaatcgtaattggcaaaggccagttggctgactgcccggaattaaatcttccaggcattatcatacccggattaccagactgcaattttcctgaggtaccaggactgcctgaggaaccagatacggaacagcctgatgtgcctgatacagagcttccggaggaaccggacacagaacttccggaggaaccggatacagaacttccggaggaaccggacacagaacttccggaggaaccggatacagaacttcccgacgcaccggatacagagctcccggatatgccggatacggaacagccggatgtgccaggggatgaccagcctggagatgacaattctggtgaggatatatcctttgcccgccaggtcgttgatttggtaaatcaggagcgtgccaaagaaggtctctctcctctctccatagatgaaaaggcagtatccgcagcgcaggtaagagccagagagattgagacatcattctcccatacaagaccaaacggaagcagcttcagcacagctctttcagagagcggagccagctaccggggtgccggagagaatattgcctggggacagaaaactccggaggaagtaatgaagggctggatgaacagtcccggacacagagccaatatcatgaatgagaagtttacttccataggagtaggatattaccagaacgccaaaggcgtaaattactggacccagttatttacttactaagctattcattttctaataatttcgataaaaagagatggacccgcagatcatgctgtccatctctttcttatgatagggggaactagtagtccttgcgggtatctgaagtcccttgaaaatttatatgtgggtcaggcagaaactcataggtggaagttctgtagcgatagagcagatacaaaaacagcagtacattgacacatgtagtcagaatccctccctctatgccgaaatcgcccccgttcagcaggtttgctgcagggtagtgtgaggtcataatactgctgatgttcagcccgctgaccggcatgccataaattacagattgaaaaatattccatgtgatatgataacctatgcacatccacaaattgccggatttgtagtacgaatatgaaaatacgattccaatgagtataatattcactatggatatagccgtcactccgggattgaagaggtgaatcccggcaaagataacagatggcagtgccataatcagatatatattgtttgatctgcgcaggacagacataagtaatccgcggcaaaacagttcttccccaaaacctaccagcagcaaagcgacaatccaccaaaataaggaagagtaggagtccggcctgacagaataaatacgaacgttatctgtaaagatcaggattagaaagatcatcgtacatgctccaaacccaaggagcaggccggtgatgccatcttttttaaagcttttactaaaatcccgaagccctaagtccctccactgatacctcataattttccagacacttattgacaggaggatgattacaatttccattaaaatctgcagcgcaacaggcagtgcatcatctattgcaagtgcaagggagctcatatagcctgttgtgtcattgatatctccggttgctatcaatatttttcttaatatctctacgcttaacatacttgccataccggtgagggcataaaacaatgccatacaaatgaaaacaatccacccggatcgaacgaggccataacgatttttaaaaacttttctcataaagtttccttcctccatagttgtgtttaagggccccgtaaatcagccttgttacatttaggttcagtatcgtctctgtattcttcccgggctgttttattccggaaggatatattcagttactttatccgtaaacaaaataccgtctaggtgatccagttcgtggcaaaaacattttgccatttcaccggacacagtatagatatgttcttccccctgttcatccagcgcctgtaccgtaacctgtaagggacgaagtgtctttccaaaccgatccgggagactgagacaaccctctacacactcctgggtaccttcttcttttaggattacaggattgacaagcttatactgctgcccatccatatggattacaaccagacgtttcagaatacctacctgcggggcggcaatggcagcgccattttctgtgtgatggagggtatccatcatatcctcaaggatctcccgtatgcggtcatccacacagtccacgattctgcatttttttcttaagatagggtcattctcataccgcagtacgcgtatagccataagagcacctcctgcttttttctgtccttgcttttcgtttgctttcctcaaacataaagacttcttcaattctgcagccgaaaattcgggcaatatttactattataaaaaagtccctctgatgtgtcaagcagaccttacatatggaaatgataattgcccctgcacgctccctttgtcccgtgttataatgataaaaaacagtgcaaggacaatacgtatgaatatatatcgaacatactttttaaactataagtttccgttcctggcgggtgtcatctgtgtggccttcgaggcattctgtgacctgctgggtcctacccttatgggcaggatcatagacgaaggaattgtcaaaggggagatggggaccatcctgcgttggggagtgcttatgctgctggtgacaggagttggcgcctgttttgccgttgcccggaatattctggccagctatgtctcccagagtgtgggggcagatcttcggaaagatgtattttacagaatcctgtacttttcagagaagagtgtagataccatagaaagcggttccctgattacaagaatgacaaatgacacctcacaggttgtaatgtttatcaatggaattatgaggattttcttgaaagctcccataacctgcatgggaagcattattctggcaacggtgctaaactacagactgagtataattgtctacggggtagttgccctggtcgcctttctcatcgtactaagcatgcggctcagttatcccaggtttttccgccttcagaaggccatggacggggtgaatgctgtgattcaggagtatctcattggggttcggctggtaaaatccttcggcacatacagagaggaaactgagaaattcagggaggccaatgaagctttgatggataaaagtctggatgcgcagaaaattattacctggatatcccctcttctgaaccttaccgtagggatggggacgctgcttgtaatttatggaggaagcagattgttcgcctggaatctggccggagccggtgacatctcggcctttacaatttatatggctcagattttaacttcccttgtgattataactagtgttttcaacatttttgtccggaccaaggcatctgctgcacgtatccgggaagtgatggaatgtgaagaggactgggctgctgataagcgcgaagcggcagaaaaggaagagcctctggagggggcagtagtctttgaaaatgtaacctttgcttatcccggggggagcggagaaccggctctgaaggatatatcctttcagatctccccaggcaccagccttggcgtcatcggacccacaggaagcggaaaatcaacactggcatggctcctcctccgcttttacgataccgacaaagggagaatactggtggggaaccaggaaatatcgtctattcacccggagagactcaggaaaaatgtagggattgttcctcagaatcccatgttgttttccgggacggtggaggacaatatccgatggggaaataaacgagcggagcatgaggcggttgaaagggctgcagcctgtgcccaggcagattttatttcccggatgcctcgtggatacgaaagctatctgggcagcagcggtgtaaatatatcaggagggcagaagcagaggatctccctggcaagaggacttctgaaagaggccccgattcttatcctggacgatgccacaagtgccctggacggaattacggaggcaagagtaaggaaaaaccttttggcccgggataaccgccagaccctgattctcattacacaaaagtgcaccacggccatgtttgcggatcagatcctggtgctggaaaacgggagggcagcgggctttggaacccacagagagcttctggcttcctgcacagcctaccaggagatctatgcctctcaggtggagcacaaaagggaggagggataaaatggaacagggaaaaggtctgtacgacatgggaaagatgccgtctatgggacggggacatgtgggcggagccagaagattttcctcctcggcaaaaccgcagaatgcaaaaggcacgttaaaaaggattctcggaatctatctcaaatggggcagggcaatttttgcagcagtggttttaaccgcgcttgcctccgtcattaccgttcttctgccctattttactggaagggcctttgatgcctttcaggcccagacaagaactgtacaaagagacctgctgggaacagcgctgtttattatggggagcttgtacgcagccaactggctgattaccaccgcaaacggcctgtgtatgctcaaggtgacgcagaagcttgtgtttgctctgcgctcagaatatttctccaagcttcagaaactgccccttaccttttacgacacccggtctcacggggacactatgagcagacttaccaatgatattgacaatatcagctctaccattgcacaggccactacccagctgatttcaggggttcttaccctgacaggctcacttgtggttatgatttccctgaatctgcccctcaccggcgtggttcttctgtgtgtcccgctggtggcaggactcaccaagctgattgcagggagaagcaggagttatttcctgcgccagcagcagagtctgggtactctgaacggactgatagaggaaaatatcaggggacttaagatggttaaagctttcggcagacaggaggatgtactggaagagttttctgttctcaacggacagctgtttgaaaacagcagaaaggcgcagacctggtcaggatttctgatgcctctgatgaatgtaattaataacctaatctttacgctagttgccattgccggaggaatcgggacggtttcctatgggctttccatcggcacagtaataagctttttaacatactctaagcattttgcccagccgctcaactctgtggcagggatgtttaataccatacaggcagctctggccggggccgagcgtgtctttgagatcctagacgagagggaggagactccggatcccccggatgcggccgttcttgaacatccggcgggagaggtggccttctgcaatgtggatttctcctacgaacagggaaggaaagtattggaagatgtaagctttcaggtgcatgcgggagaggtggtggcacttgtgggagagaccggagcaggaaagactacccttgtcaatcttctcaccaggttttatgatcctgaccggggcaggattctcatagacggagtggataccgttacaatcaccagaagaagcctgcgggattgcttttctgtagtgcttcaggatacctgcctgtttaccggcacgattatggataatatccgctattccaggccccaggcaggggacgaagaggtgataaaggcagcccgtatggcctgtgcccatgaattcataacccgtttgcccaagggatatcagacggaagtatcaggaagcacagatacacttagccaggggcagaggcagctgcttgccatagccagggcagtcctctgtcaggcgcctattcttattctggatgaggcaaccagctctgtggataccagaacagagaaatccattcagagagcactggtgactttaatggaaggccacaccagctttctgatcgcccacaggctctccactattcgggatgcggacaaaattatggtcataggggacgggagaatacaggaaacaggaacccacgaggagctgatgagaaaaaaaggagtttattatcgaatggttgcgggtcagatgggtcaggaggtataataatagcggtatctgcggattaacatcccgcctcacaggagaaacacagggggatttggcaaagcattcataataaggaggagaatatatggcagaggttacactgggaacaaccggcattacagtaaataaaaatgggttcggagcccttcctatccagcgaatcggcagagaagaggcagcctatcttttgaagaaggcctacgacaacggcattaccttttttgatactgccagaatgtatacagacagtgaagaaaaaatcggttatgccttcagaggcatgcgtgagaaggtttatatagccacaaagacacccgctgttacagcggaagacttctggaaggatctggacaccagtctgaaaatgctggacacagattatattgatatctttcagtttcataacccttccttctgtcctgttccgggggacgggacaggactttttgaggcaatggaagaggccaaaaggcagggaaaaatacgtttcattggaattacaaaccaccgcttatccgtagcggaggaagccatcgcatcgggacactatgacacactgcagtttcccttctgctatctggcatcctccagggatctggagattgtccgcagatgcagggagaaggaaatgggatttattgctatgaaggccttatcagggggactcataaacaattcccgggcagcggctgcctatatgggacagtttgaccatgttctccccatctggggaatccaaagagaaagagaattggatgagtttctctcttatgtaaagacaccaccggtgatggacgacaagatacggcagctgatcgaaaaggacagaaaggagctgtccggtaatttctgcaggggctgcggctactgcatgccatgcccccaggatattgagattaacaactgtgccaggatgtctcttcttctgcgccggtctccgtcaaagctacagctgactgcggatgtgcaggccaagatgaagaagatagaagactgtattcactgcggacagtgtgcccagcgatgtccttatgggctggacactccggcgctgctggaggcaaactacaaagattatcaggaggtcctgaacggaaaggagatctgatgtggctaagattgtgacattgatagaagacaccggaagagatgacggcctggagaaggagcatggactgagcttttacattgaggcggcagggcataaaatactttttgataccggggccggcaatagatttctaaccaatgcagaggcattggacatcgatatctctcaggcagataccctggtaatctcccatggccattacgaccacgggggaggaatggaggcctttctggaaatcaatcaaaaagctgggatctacatccgaagggatgcttttctgccccattattccttaaaacaggagggatggacagatatcggtatctgttccaaattaaagaactccccaaggatgcggtttacagagcaggagtttcagatagacgagggcctgttccttttttccaatgtaaaaggaagggtcctctggccagactccaaccaaaatctgaaggtgaaaattggtgacaggtatgtgcaggatgactttgcacatgaacagaatctggtgatttcagaagacggcagaaaaatcctggtggccggatgtgcccacaatgggattatcaacgttctggaacattataggcagctgaaaaatgaaatgccggatcttgtagttggagggcttcacctgacaaatcccagagccggaacatccatagagccggaaatcgtccgggaaatcggggacaggctgtctgcctatccctgcagttatatggtctgccactgcactggggaagaagcatatgggatcctccgcagaaagctgggagacagaattcaatatataaggacaggagatgtgatacattgatagtgacctggattggagatatacggccgctgttggaaaaagcgttctatgagcactgttaccggatgctgcctgccatgcgcagagataaggcggaccgcctgtcccgtatggaggacaaagctctaagtgcaggggtatggacactgctggaaagagccagagaggaattcggttttaggggctaccccctgtataatctgtcccattcttttccctatgctttgtgctcttttgtgacagaggatgcagatgttcatgggggagtgcagctgggatgtgacgtggaaactgtgaagacgccgagagtatctgtagccagccgttattttcggcctgaggaatatagatatattctggagcagccggatgaggaaagacaaaagcaggcatttttcaggtattgggtcctgaaggagagctttttaaaggcgacgggcaggggaatgggactttccatggacagctttgagataacaattgctgaggagggaggcagtacagcgcctgtgcttacccgtaatcccccggaatatccgggtacctactattttcaggaataccaggcagcgacgccggacgccagggtcgctgtctgttctacctgtccggactttgcacccgggctgcggtatgtggaattctaatcaatcggaaaggaataggatgctatgagcagaataatgattgtggaagatgaccaggtgatagccagagctataaaaaagcatctggaatcctgggactttgaggtgtattgtgcggaggattttcaaaaaatactgtcagaattcgcagagttccagccggagcttatcctgctggatatctcactgcccttttataatggattctactggtgtacggagatccgtaagctctccaaggtgcctatcatctttctctcttccacaacagataatatgagtattatcatggcgatgaacatggggggtgatgactttattgaaaagccctttgacctgcatgtccttacagccaagattcaggccctcttccggcgcgcttattcttttcagggcaaggtggatatgatagagcacaaaggagtcatcctgaacctgggtgatgcggccctgtactatcagggggataaggtggaattgaccaaaaatgaattccgaatcctgcagacgctcatggaacaggccaataaagcagtatccagaagtgatattatgaccaagctttgggagagcgacagctatattgacgacaacaccctcacggtgaatgtgacgcgtctcaggagaaagctggaagatgccgggctcacagactttattaagacaaaaaaagggatcggatatatggtggagtagatgagagaggataagaagccaaaggttttattggaatatgctaaaaagaagcttcctctgtttctgtacctgtcactgtgcaccggtattttctggatggtgttttcgctttataacctgccggcggaggctgttgggtatgcagccctgctctgtctggcggcaggcgtgctgttctttctggggggattcttccggtttcggatccggcacagagctttgagggacctgaggcatgaagtcactgtgcacctggagaatcttcctgagacaggggaactgctggaacgggattatcaggaactggtcagaacgctgtatgaagaaaaaaacaggcttcaggaggcaatggaggcgggctatcaggagtcagtggattactatactctctgggtacatcagattaagacgcccattgcagccatgcgtcttttattgcagtcggaggacagccggctgagagaggagatggaactggaggtttttcagacagaacagtatgtggagatggcgcttcagtatctccgcatgggaaatatgggaaatgatatgaatctgcgtctttacaatatggaacaccttatccggcaggcaatccgcaaatattccaggctctttatcctgaaacatattgccttgcatctttcagaggtaagcagcagagtgattacagatgaaaaatggatggtgtttgctctggaacagcttctttccaatgcgctgaaatatacgaaacagggcagtatctctatctatctggatccggacagagagcagaccctggtaattgaggacaccgggattggcattcaggcagaggatctccccagggtatttgaaaaaggctttaccggatacaacggaaggaaagataaaaagtctacgggcattggcctgtatctctgcaaagaggtgctggagcggctgtcccacaaaatagagataacctcagaagtcggggtgggaaccaaagtaaagattgattattcagccagatacagagagtttgaataatacagatgggtattgctgagtcctactagacaatcgggaaggacttattatatatttatgcagtaaataaattacgaaggaggagaagaaacttgaagaagcttataaaagagtttaaagactttgcccttcggggcaacgtgatggatatggcggttggcgtacttatcggaggtgcgttctcaggcatcgtaacatcccttaccgacaatttcattcagccgactattaacatgattataacacgcaaattttacagtttggaagaaattgcagggtatgcgtctgcattcggttcatcggtggtgaacttcctgattatggcgcttatcctgttttttcttctgaaagcaatgaataagttactgaccatcggtgccaggaagccggagccggaagcaccggctgtcaaaatctgtcctttctgccagagcgaaatcagcataaatgctaccagatgtccccattgtacctcccacattccggaggctgaggaggaagtacaggctgaaattgcggaagtgtaagcaactacatacttgaagaattccccctgcagggccagaaggagctggtcatgcagggggacacacaaactcctcataggtaatcttatcgaaggagaagttcaacatttgcaaatatagttcttcgccttttgtatgcggtctgttaatgcaagcatccaatatttctgtctcattctccaatggcgttataatatgtttcttttttgaaaaagcttcataatagcgaattccgaatttcctttgtgagaccgcattcagatgaattccatcaggatttgatgttaatcccgctgctgtcacgaaataagtatgtttctgctcttttgcgaacctgaataattcttgattaaccatttcatattctgtacagtttagtccaaaaccggatttccccagataatcacccaaagcaccaatcacaaaaggaactttttctgcatgcagatcctttcgcagttgatttacaagaacctgtaatttttcataatatgtttgatagtttccgccaaagccgtcattttctccctgatgccataaaataccaagcagttctgaatcctgcatggcaaaccttgcctgacagacagcgtgtttatagagagttttgtccactgcccagtcatctaaagcgcttccgccttctgcacatggaatgagtccgatgttatcgtcttcattttccatacaccacattgcggcaaaggaaccggcaagcccaacacctgctgtcggtctgtcatagttaatcggctctgccatcatctgccatctgccgttgcggagcatctgaatccgttcattacagatggttggcacgtcattcaaaaatcctcgtcctgccatattggactgcccaatcattaaaatggattttgtcatactctttttacctcttctttctcccatttaccacgtttatctctctccccttttttcaacttacaccattataattgttcttctgatataagagaagaactggaaacagctatatttatttttccgataaaagggctttacccttttggtcggataaagccctgtaaatctgattttattatagaattattcacgttcactgccaaacgccttcttcgatatatccggttagcaaacaataaacttctgtaaagtatagcagattttcagatgaattttatatctggttttcgattatccgtgtaaacactatactttcaaacattttgcagtatagaaaaacactcattttaccacgaatttaccacgattgcatgaaccttgatatgctgatataaattacactagaagacacctaaaatgttacttttgtatatatagcagtcaatcctatggctaacagtgttgtatatatagttatgaggttactaaaattgaatttataatttggaaaaagctatattatacacatcgtcctgttctggtaaatgtgtaatatagcctatcggtaacttgttttccgtcgcttcaataactgcttttgcccccacctctccaaaagcaccacataattctatacaatcaattccttcttcatatagttgtttagccactgtacatgcttcttctatatttgcaactccaacaatctgtgcttctccgttatgtataatagctctatcaaccatacaattaaaatttccaataatcaaaaatgcaaacttcattacttttacctccacaaattcacgtttttgggttgtttttatatccacattataacagttccatatatcccctacaagaaaaaacaacaggggagtgttgtaaacttgtgatcatgtcaccttaggatgcacttaagaaaatgtcacttttgtggaacctatagtagaatagaaagtaggtaaactattttttattcccaaatagtaaaaaaacagctcagcagaccgtataagaatttataccgccatgcgaaagttccttatttcatgcgagttagcgcgtatcggatccgttctatggtaaaagttcttgcaacatacttttgtgaagttgggcgggatttgggcgggatgacgcggagtaaagaaccgactgtgaaagcggaaaaatagggtctcccgaaccctaacagaatgggtctctgcgggcgcggaaccgaggggttctatatcctttcacttgtaccccggaaaagggttcagcgggggtcattttcatcacccctaactgggcggctgcgcgtcctgccggacgctgtgagcaagtcggtcaaaccttccgttttcagcgccctttgacggggattgggggtagcccccaacaagcggtttgaacagttttcgcatagcggaaaatgggaaaacgcataacggtgtgtaccgttgtgccctgcttgccactattgaaaacgtcaaaagaggaagtgcgttttataccaataaggcgtactttaccaataggacgcacttaaatcagccctacaaaccttaatgaattgttttgctatacaacaagcattgtagcggtacttttttatctttcaagtcaattactacatcttttgcttctgatttcgtaaatcctcggtgttcataaaactgataggtgcaggcattgtcggtgtagagataaaccagtttccccggttcttccgcttcaaatgcggaaagcagggctgtgccaacccccttgactttacattccgggtcggcagcaaggaaaactatttccccatcaggttcctgctttttgcggaaggacgcaaacatctctttattcgctgtgtcatatgcgccaacaccttcccctgctacgatgttttgcataatatcaaatgctttcacaaagattgttcgccaaaagctatggtgtcgttttttctcccccttcatatcagcaagcaacacgccaacaaaacaatcgttcacatacgcaccgtaggctttcgttgcccgattcaactccatgtgccagaaatatttgctatacagagaaagaatggtttcgttgtccatataccaatccaagtgcattccttgaattgcaaacttctgcgcctttttataatccttcttttgtatttctcttatttcaaccatatttacctcgcaaactggaatttgtcgtgctgcgccttatccgcctaatgcgaatatttttgtttcttctactctaaatgctaatgccgaaactgtcaagttgctatatctattcttatattgtgccccaagtctttataaaattagggcgggaatcgggcggaattttggtcaaatcatgacctgtaaacattttacagcacaagctgggaagagccgttaaacgccctaatcatcaaccttcccagcctcgttgtcttgacatgaacccgatcgtacaagctgaatccgacactattgtttatatgcgctgtttttggattacaccagtcagtatgttagacaggcttgattaccccttaatttagaggcagtgaatataaaatagaagagtctgtttatgatatgataccataatcagccgtttctgcttataatattttgccggaatcagtcaaagaataaatttgaatataaaatagtattatagtatactttaaattataaaacaatataaaaaaacaatattaatttgataaaaacaatgtaatgtttgcagaatttggaaaatttactaatatactaataacggctaatatatgtataaatatattaaggtttcaaaaggaggtacaggtcaatggggaattaaaataatactaatgaactgtaaatcaagaaacttaggagggagttaaatgaagaatgaaaagatgaaggtaatttgcgtattactgacagcggctattttggggtaattagtattattttgatgctgaatgatggatggtcaaaccgaatatatgactggcacgggcagatataagaacacaattgtaataccattgaggagggattgttatgacaaataaactgggtaagattgtatttggcgtatttattatttcgatgcttacattttctaatgtaatggcatcccccattgaaaaacttccagaatcagaagattatgatgaaatctatttattaaaagatgatatattacgttttgtaaatggaggacctgtcagcgaaactggtacaagggatgctatagagtctgatatagattttcaaaatgccattaaggaatatcttgatcctcaatttattgtagatcaggttacatcatatgaggattctatagaacttttgaactctagcatatatatgtggataataccagtgagagtcgatggattcttatatgaagcatgtatatcaaaactaaatgacggtaatgggaactggcggatggatatggtatatgtgtcccaagaaggttcatatactttgtcagaacaattaggacaatctcttgaaaaaaataatatcgatccggactcctacgagtttaaattaattggtggtataacccaattagatatccagtatttctcgctatgaatgaggagggaattaaatatcttatacctgctaaaagttcagcaactgtggcgattacggacagttctcaaaaaccaagtactcgtaacgcggagacagataccggctttggggttatggagaccggagcggatgggtttaccgcatatgattactcaaaggtgctcgcagcaaagatcacagcagcacctatcggaagtggaactggaggagcagttattgacttgggtcaggctcgtataccatataaagaaagccttacattttttggaattagcattgtatgtttattgattattggcataagatatagaaagaaatatgttaattaaataattacaaaccgggtgcgacgaaagtcaaacccggttttactttagcgttcacatttcccagtggattgcggtataatgaaaactttaatcgtattttacaccaattgcccaagataatataaaaaattataaagggttatctgaataattatccaactaaattcatgaaaaatgctgtaaatatgcagatatatgcgattataacgggtattatattgttaagcaaccttacggtttcgtaagattgcctcaatgaaatgtaagcccaatctatggcagaagatctgtaggtttggtattctgatgtatgtaatcgcagggaaaacctgctatcatatggatggaggattaattatgaaattattggacgtaaaaaatgtaaaaaaaacatatactaccagattcggcggcaataaagtgcaggcattgcgcaatgtatcattttctgtagaggaaggagaatatgttgcaataatgggtgagtctggttccggaaaaaccaccttattgaatattctggcctccctggataaacctacagggggagatgttatgctgaacggaaaaagtattgtggggatacgggaaaaggaaattgctgaattcagaagaaataatctgggttttgtgtttcaggatttcaatcttttggataccttttccattcaggataatattttgcttccccttgttctttcaaaggtgccgtatgaggaaatgaataaaagactccttcccctggccaaacagctgggcatagaggcaattttaaaaaaatatccctatgaagtatccgggggacaaaaacagcgtgccgccgccgccagagcattgattacaaaccccaaactggtactggcggatgagcctaccggagctcttgattctcgttccgcagatcaactgctggatatgttttcagagattaacgaagagggacagaccattttgatggtaacgcacagtgccagggcggccagtcatgccggcagagtgctgttcatcaaggatggggaagtctacaatcagatttataagggaaatatggacagtgaggaacttatgcaccagattaacaatacactgacggtgctgatgagcggaggtgaggaacgtgaataaaggcttttatcacaaacttgcagccaataacatcaaaaagaataaaagagtatatatcccttatatactagcagggattttcactacgatgatgtactatatgctgaattccatctccttaaatgagggactggatcacatgagcgggggcgccagcctgaagattatactcaatctgggatgttgggtgatcggaattttcgcggtgatttttctgttttatacgaaccgtttcttaatgaagcagaggcagaaagagataggacttctgaatattcttggaatgaataaaggccatattggtaagatgctgttctgcgaaaccctgcagattgcactgattatcatagtgggaggactggtgggagggcttctgctgaaccgtctcatgttccttcttctgttaaaacttttaaatttttcagtgaccttgaaatcggcaatatacggtaaagcccttttgtctacaatctgcctttttgctgcgattttcctggtgattttggcaagcaatctgcaccagattcacctcacaaatcccatagatctccttaaagggggacagagaggagagcgggaacctaagacaaaatggctgctggctctggtgggagttatctgcttaggcattggctatacaatatcaattgtcacaaaatctcctctggatgcaatgatgcttttctttgtagctgtcattctggtcattattggcacctatgctttgtttacagcaggaagtgtggccatattgaagcttctgcggaaaaacccgggatattattatcagacgaagcactttatcagcgtttcgggaatgatttacagaatgaaacaaaatgcggtaggtctggccaatatctgcattctatcaacagcggtgctggttatgatttcaggcacggtatctctgtatgtgggacaggaggatgctcttaaaaccagataccccagagaagtgcaggttacaggatatgacatcaatgaagaaaagaagcagattgtcaattccatagtggaggagaccttgaaagaccgtcagatggaggcagtcaatcagtttgctgtcagtatgggaagcatggttgcttataaagatggcagcgattttgaaatcaccgaactgcaggactttaacagcagccaattaaaagagatatgcctgattcctctggaggagtataaccgcctggagcacaaagaggaaacactgaatccgggcgaaatcctcatgtactcaaaaaacgattccagtgacgctcagattactatagaaggcgatacctttcaggtgaaaaaacatctggatcacttatttgatacagagagaccggaggatcaagaactcatagaggtatattacatgattctcccggacgcagatgcggtgaagaggcagatgcagaaacaggattttaaagaagccaatctcaacggacttatgtataagtatgggtttgacttaaagggcgatgagaatgagattcgggactttgagagtgacctgaagtcacggtttgagcaaaatacagacggggatttggccgtctttgtggaaggaagattatccggcagagaagatttttattcggtatatggaggactgttctttattggtatcttcctgggcctggttttcttaatggcaaccgtactgatcatttattataaacagatttcggaggggtacgatgacaaagagagatttgccattatgcagaaggtgggaatgagcaaaaaggaaatccgatcatctatcagaagtcaggtacttaccgtgttcttcctgcctttggttatggctgtcattcacattgcttttgcctttcctatagtaaccagattaatggcaattatgaatctgacgaatgtaggactgtttgctgcctgtacgcttggcgtgatattggtgtttggggtactgtatggaattgtctacggagtgacggctaggacgtattataaaattgtcgagtaggagagaaatagcttcctaagtttggataccccagtgggaacaccgttcgtatgggcagagaatgctttatgtgcattctctgcccattcttacgtgcgtctggcctgtctctggccccaagacctcctcccttgaccgtccccaacactccgctggcaactattttacctcgaactttacatacactcttccatcatctatccccggtcaccgaatgcccaaacctctttttataggccctggaaaatgtggagtaatctttaaacccgcagtctaagcaggcctgtgttacaggcatccccttctctatcaattctttggcaagagacagccgtttgtatgaaatataattcccaatggtataccccatctcttctttaaaaagccgcatcatgtgatagcggctgatataaaaggtttgagccagatgatcaatggagagatcttctgccagatgttcgttaatgtaagccaacaggtccatgattttggaattgcaggtgctggtattcaggtattccaggtcattgctgagggcggcacggttcaaatgtatcatgaactccagaaaaagcagctggcggtacaagctgctggcgtaggcggaatcagagaatgattgctccagcgccacaacggaatcaaaaagagtcgttttgcccagggtatgcatgcgcaggacattggaattctccgtttgtgccttttgaaagcagtagctgagatcgtagtcgccggtacggtaatctttaataaaattaggagagatatagacgataatccgttcatatggcactgtcacatctatctccggacgatgaatggcattgtggttgacgaatacgatatcatagggctttagttcatatgtttttccctcgatcatataatttaccttaccactgataaaaagaactattttatcaaaatcatggtaatggaattcaaattctgtcatgggggcatctgtcaggtgaaaaagctgaaattcactatttaaatacccacgtttctcgtatatactcatagtagacacctcttttgtattatacagcataatttgcaatataaaaagcaccatttcgattttgtgatcaaataatgcttgctatgataggaaaagagagaatagggaggtatgaattatggcagttacatttaaaaaatatcacggtttggggaatgactatctggtgtacgactgtattaaaaacacttatgagctgacacctaagcgggccaggatgatttgtgacaggcattttggggtggggtctgacggaattttggtggggccttattttgaggaagacggcatacatgtgaaaatatataatccggacgggagcatggcagaggagagcggaaacggaatccgaatctttgcccgttatctcaaggataatgactatgttcagaaaaaacattttgttctccacacagacagagggcctgtggaagtgacctatctcaatgagaacggcagccggcttcgggcatctatgggaaaactcaattttttcagtgatgagattcctgtcacaggacccaggcgggaagtcatcaatgaggagatggagtttggaggaaagacctataagaccacttgtgtttctataggaattccccactgtgtcattcccatggatgaaatctcaagggaaaaggtctgttctattggaaagttttccgaggacgccccctgttttccgaacaggatgaatacgctgatcatgaagcctatagatgaatacaatatagccatagaaattcacgagaggggcgccggttacacactggcatcaggcagcggcagctgtgcggctgcaggtgtggcataccgcctgggccttgccagcaataagatgaccgttcatatgccgggaggagaacttcaggtagaaatcgaagaggacggcgaagttcttatgaccggagatgtggggtatgtggggactactaccctgggatatgaatttttggctaagcttagagtgctggaataaaaagacagtaaaccggaccgtgtgagcagagatgaggagacagaatatggatatagaattgagaaaagagattctgcggctgttggagaggaatgcccgtctgagcgctgaggagatcggcgtgatggcaggcaggccggcagacgaggtacagaagattatcagagaactggagaatgagcaggttatatgcggctaccatacgctgattaactggaacaaggaagaggaggaactggtaactgcactggtagaactgaaggtaactcctcaggggggagatggctataataaaatcgcggagcagatttaccagtatccccaagtggaaactttatatcttatgtcaggggcttacgattttctggtagagctgaaggggaaaaccataaaggaaatctccatgtttgtatcagaaaatctggcgtctatggatgaagtgcaaagcacggctacttattttacgctgacaaaatataaggagcagggagtcaacctgatcaagaaaaaacaggatggaagaatggtgatcactccatgagccggtttgtgactgataaagtaaagcagatgaaaccctcaggtatccgaaagttttttgatttggtcagcgagatgccggatgccatttcccttggggttggggagcctgattttgatacaccctggcatatccgggaggagggtatccgatctctgaaagccggcagaaccttttacacctccaacgccggtctcaaggagctcagggaagaaatatgcagacatatgaagagaaaacaggggcttagctacgatcccttaagtgaggtttttgttaccgtaggggggagtgaggccattgatattgccttccgcaccatactggagccgggggatgaggtaattattccggagccggcttttgtatcttatgtaccctgtgtacagctggctgacggagtgccggtaacgatctccctgaaggaggaaaaccagttccgtttgaagccggaagagctgaaggcggccattaccccaaaaacgaaggcgcttcttttatcctttcccaacaatcctaccggggcgattatggagaaagaagatctggaggcactggtacccctgattatgaaacatgatctggctgtcatatcagatgaaatctacagtgaactgacatacagagatccccatgtgagcatagcaggtcttccgggaatgcgggagagaaccattcttatcaatggattctcaaaagcctatgccatgacggggtggagacttggttatgctctggcacccggtgagattatgaagcagatgatcaagctccaccagtttgccattatgtcagcgccaacaaacagccagtatgcagctgtcagtgcactgagatatggggatgaggatgtgcttttaatgcgccagtcttacaatgaaaggcggagatatctgatgcatcggttagcgcagatgaatatttcctgctttgaaccgtatggagcattctatattttccccaatatatccaggttcggcatgacttcggaagaatttgccaaccgattgctttcggaggaaaaggtggctgtgatccctgggactgcgttcggggaatgcggagagggatttattcggatttcttatgcgtattctattgaagaattgaagactgcatttgacaagattgaaagctttatctccaggttagcctgagaatacagggcggggacacactctccgtccttttgccgtagttacatgttgttccagaaaaggagcagattatgcagattgagagccttgttattcggaactttaaatctatccgtgaaatgcgtatagagggaattgaaaatgccctgattcttgtggggaaaaataatacgggaaaaacttctgtcctggatgcgattcgtgcagtgggcggggtgtatgagataaaaaaagaggattttaatgaaaagcgccagaatatagagattcaggttacgttaagcttttctcctcaggatttggggcttcttcacagccttgggatggtcagccagtataaacgctatgagctgtgggagaaggacttttgccagaagctgccctcctataaggacggtaagctgttctttgagttttcagccaattatgaggggaaaatacggtatcacgatggcattaaaaagaataactcccatattcgggaggtttttccaaaaatttattttattgacatacagcgggaggttaaagaaatacaggatgatctgctgatgtttcaggaaaacgaacttctcggcagaatgcgctctggcagctgtatgttccatgaggggaagcagtgtcagcactgtttttcctgcatagggctgattgagaagaagacgccccgggaactggatgtgttcgagacatcaaagcttctggagtataagatgtatcatatgaacctaagcgatttttcccgtaaggtgaaccggaatttcagaagaaacggtggttcttctgaagaaatctgctatacgatggaatgcagtccggatcatatgtttcaggttacggtagaaacgtatcacagcggcagaaacagaaagcagcctattgaacatttgagcaaaggcatgaaaagtatctatatgctgtctcttctggaggcatacgtggaacagggaaatctaatccctagtattatcatgatagaagatcccgagatttttctccatcccaagctgcagaaggtttccagtgagattctgtatcggctgtcgaaaaagaatcaggtgattttttctacccactctccgaatttgatttttaactttaacagcaggcagattcgtcagattgtattgggggaggatgaatattctgttgccaggaaaaagacgaatataaacgctattctcgatgacctgggatattcggccagcgatttgatgaatgtaagctttgtatttattgtagagggcagacaggataaaaaccgtctgccgctgcttcttgaaaaatattattctgagatttatgacaaaaaagggaagctttcgcggattgctattataacgaccaatagctgtacgaacatcaaaacttacgctaatctgaagtatatgaaccagatatatatgagggaccagtttcttatgataagggacggggacgggaagaatccggaacagctggcaaagcagctctgcagatattacgatgagcgcagcctggaggacattgataagcttcccaaggtaaccaggagaaatgttctcattttaaaatactattcctttgaaaactatttcctgaatccggagattatggcacagctgggagtgatagagactccggaagagttttaccgcatcctcttcggaaaatggcaggattacctctggagaatacggagcggacagcatctgacagaagtgctggggaagaacctggaatctgaggaagaactcataagccatatggaggaagtgaaaatttacctgcggggccataacctttttgatattttttatggcagatataaggaacaggaacgggagcttcttaaaaggtatattgaccttgcacccagggaagagtttcaggacattctggatgcggtagacaggtttgtttattttgacagcagaaaaagggagaatgagaaataaatgggagaacccataacagtattgaattttgatcatgtctatgaggaacaggatttttaccggaaggagaagtatacctggatcgatcttacagatgtatccggggtaaatggctactgtgacagccatgccatggctgtactgagaaaacggctgagacaaagaccccatgccagaattcattttattgattccggcaattatcactatgtgacttatctgctgctggaatatatcagagaaccatttgccctggttctctttgaccatcacacagatatgcagcagccgctttttgaggagttattatcctgcgggtgctgggtcagaagaactctggaggaacataagtatcttcaggaagtaattatgatcggaatggaaaaaaggcagctggaggccattgatcctgcatacagaaagcggattacagcatatagcaggcagacggtggaggaaagcgatgtctgggaggaatttgcggcgcggcatattcattatccggtatatatttctattgataaagatgtaatagacacgggggaggctgctaccaactgggatcagggtggactgaccctaaagcagctgaacgaggtttacggaaagatctgcagaaatcacagggtcctggggattgatgtgtgcggagagagcgcagactatctgggaatgctggaacgcttcgaagcagataacagcaagaataaccaggcaaacgaaaaaatcctgcacatgatagaggaaaagacattttcctcgtaaaaaagacaattttttctggacttttttaaaatttaacgataatattatgtattatgttgtaatggaatcatacaatcgggaggaaaagcagcaatgaagaaagtagtgaaattcggcgggagctctttggcaagtgcagaacagtttcagaaggtgggggatattatccgtgccgacgagtcaagaaggtacgtgattccctctgcacccggcaaaagatttaccgatgatattaaggttacggatatgctgtatgagtgctatcaggcagctgcagagaagagaaaagaatttaaaaatctgctgagatgtatccaggagcggtaccaggagatcatcggcggtcttggccttactctgtcactggaagaagaatttgcggtaattgagcagtcatttaaaaatggtgcgggagagcagtatgcagcttccaggggggaatttctcaatggtaagattatggctgcctatttgggatacgaatttatagatgcggcagaagttattatctttgacgaaaacggtagttttgaagcagacagaactgacgagatactttctgcacgcctggaaaatgtaaagactgctgtaatccccggattctatggtgccacagaggatggggtggttcacaccttctccagagggggatcggacgttacaggatctatcgtggcaaaggcgatcaaggcagacctgtatgaaaactggacggatgtctcaggatttttagtggcagacccgagaattattaaagatcctcaggtgattgaaactatcacatacagagagcttcgggagctttcctatatgggagcaactgtactgcatgaagatgccatcttccctgtaagaaaagaaggaattcccattaatatcagaaacaccaatgcacctgaagataagggaaccttcatcgtagaaagcacctgcagaaaaccaaaatacaccattacaggtgtggccggcaagaagggattctgctctatttacatcgaaaaatctatgatgaatgcagagatcggatttgggcgcaaagtccttcaggtattcgaagaacagggtatttcattcgaacatgtgccgtcaggaattgataccatgacagtatttgtccaccaaagcgagttcgaagaaaaagaacagcaggtaatagcgggtatccacagagccgtgcagcctgatgtagtagagatggagtccgatctggcccttgtggcggtagtaggccggggaatgcgcgctaccagaggaacggccggaagaatcttctctgcgctggctcatgccaatataaacgtaaaaatgattgatcagggatccagtgaactgaatatcattatcggtgtaaaagacagtgactttgaaacagcaataaaggcaatatatgatatctttatcatgactcaaatctaaaagaggtaaaagaggggacgtgttctttgtagaaagaacacgtcccaaaatcgatccagcctgtccctaattcatcttgccctgtccctttttctttatattcctctaatgtattgcaaaacatataaattttctttaaatattcccaccaatgtttcatgaaaaattaacagctgtcaagaataatatatgttatgattattgggtattctaaaccggaaaaaggggccggtttagaattgctgaaggcggcacataaagatgtgcctgtatagttataaggggagaatattatggataatgttatgagaagccagctgaaaaagattggcaaaaaagagaagaaactgctggacaagaataagaaggggactgttcgggcagtctcggaaaagttagaaaataagattcccgaaggggtaaaagttaagctggaaactgctttctataaaggattccgcctggtcttttcaaaagggacaggatggatcgaaaaaacatacaacaaagaaaagcgaatgttggagtatgaagcagaggattatacatatgagagagatcagaaacgagtaatcaaacaattgaataaagtttcctccagaagcagtatgtctaatctggggctgacagctttggagggaactgtcatgggggtcctgggaatcggattggctgatattcctgtgtttattggggtgcttctgaagggaatctatgaagtagctataagctatggattctcctatgaaaaagaggaagagaaatattatattcttctgatgatagaggcagcgctttcccatgaggaaacacagcgaacgctggacgacaaggtaaatgagattacagagtatttaagccagggaatcgctgtcccttatctggtggaagaacagatgcggcagactgcagatgccatggcagaggatatgctgtgtatgaagtttattcaggggatacctgtcgtgggagtgttaggcggagctgttaatgtgtcctactttaaccgggtaatgaggtatgtgaaattgaagtatcggaagaggtatttgttgtcgaaaaattgagatttaggggtgtagggcttggacttcagcttaaagtgattcaagtcggaaagtgtgaggtggcggggggacggtgagagaaatcccgcgacggtgggctggctggttcggacaggagggaggcttaagttccggggacacctccgtcgcgaagagagtctaagccaaaaccggaatccccgccggagcaccgttcgtatgggcaaagaatgcttgatgtgcattctctgcccatgctcactttttttcggccctgactgccgaaaaaatctccagcgtgaatcccggttttgcctaagactctctactcactcctgcggaatcgtccccggaacttaagcctccctcccgcccgaaccagccagcccaccgccgcagaattcctctcacctgggtatggggaagttctagggggctcgcaatttatccaaaacatcaagccaccaatagtgcgaaacaagaggaaaagtgtacaacgttcgactttccccacccgttttccgtgaatgtgaagtgagtctctgccaggatataggagggagcaccggggggccggggtatagggacaagtcagggagcctcgagctgacttgtccctataccccggccccccggtgctccctcctatatccgtccgtctgcgacgctgcgctggccgactattttatctcgaactttacatacacaaaactataatttcttttccattatataatcatccatcacaaacccattcccaatatccgccacctgcgttcttgttttccggaatcccatatgctcataagctccaatggaatttgtattgtttttattgcacgtcagccagatgagggagagtcctctctccctgcacagggaagtataaaaatcaatcacttgggagctgtagccgttgccccggtgcgctttttttatgtaaatcttgctgagaaacagcgttttgtcctcctggtgaattccggaatacccgataggagtaccttccaggttgagaagaaagtattcatatccctctcctaactgttccttgagagccgagtaggactggaagcgttccagcatatatgcaacctgttcagcgcctatgataggggtaaagtgctgctgccatatttctttggcaaggccggcgatggtcagaatctgggcatcagtaactgcgggttcaatctttaatcgtttcatgtagtatacctccttgtggtaattaaaactgtacttattataaaatgaaaccaaaacttttacaataaaatagcgaaaagccaactcctttaggggttggatggatagtgtatcatatgtttttaaattgtcttccaacattcagcccatcagatatcgtgcaacacatcaaaggttatacaagtaaggaacttagagaagaattttcacaactgtccaagatgccaggtcttttattgctattgcaagagaatccgatgtaaaaatattagaactaactgataaggtacagaacattgaaaatacaaagcgtagacttctcagaaaaatggacagaagtagacgaacgactaatgtagacaattataatactgacggtacaatcagaaaccaaacaggtatagacacgagccttatgccatcgtaaattgattcataagaagcattggtagtaaaagtcttatagaaatccattggtcttagatactttcgagtatatttggaagtaggcgtatataagaatccaacaagttttagccctaggagtgtcagaaggagattgccaaacgctacatgtgctttacttttgatagaaagaagagtaaaatagtaaaaaatgaaataatttattcagcagggaaaaaagcccggaaaggatattaagaatatggaaataaaagaaattatggaaacagccggttttccatatgaaactactttacgaagattttcaaacaacgaggcgttgttgaaaaagtttttgtgtaaatttgtagatgataccacattttgcgagcttacaaaaggaatagaagaaaaagactatgataagattctcatgcaggctcacaccttaaaaggtgtaggagccaatttaggatttgacaagctgagccaggagtgcgccggaatcgtaacggcagtgagagaaaagcggtatgaagaaatctccccttattttgagcaggcaaagaaagaatatgagacagtaatggcctgtattcgtcagatacaggggtaaaagaggaggtgtcaagcatgactgcagatgagaaattgcatagagggaaacccaggattctcatcgtggatgacttggaactgaatcgggcgatattgtgtgaactattctgcaaagaatatgaagtgctggaggctgaaaacggccaggaggctattgatgtgctggaagaacaaagcgacagcattcaggtagttcttctggatattgtgatgcctattttggacgggttcggtgtgctggataagatgagccaaaagggatggattgggcggataccggtaattatgattacggtagagacatccgacggagtaatgcagaagggatatgagatgggagctaccgatatcatctctaagccatttaatcccaatattatccgtcagcgtatccacaatatcatcgaacagtatacctacaaacagaagctggagcggctagtggaagaacagacagagattctcagacgccaatccaagaagctcagagaaaacagcgcccagatgattgacacgctcagtgctgtgatcgagtttaaaaatacagagtcggtgcagcatatctataatatacgtacacttaccaagattctgctgaaggagttctcccgcagacacagacagtatgccctgaacgaagaaaagatagaaagtatctccgaggcagcagccatgcatgatatcggaaagatagcaattcccgatcagatattaaataaaccaggcaggctgacaaaggaagaattcgaaataatgaaaacacataccctgaaagggtgtgagattctggaaaaactggctaccgtacagagcctggcttactatgattactgttatgatatctgccgctatcatcatgagagatgggatggaaatggctaccctgacggattgaaggaaaacgagattcctatctgggctcaggcggtgtctatcgtagacgtgtatgatgctcttacaagcaagcgggtgtacaaagatgcctattcctcccagaaggcgattcagatgataaaagacggggaatgcggagtgttcaaccctcttatgctggactgttttctcaaagtagtctacaagtttgaggagggcatacgcagagagtcagaggaaaataatctgacagatgaggacagcggtatcattgtaccagatatggaaagccaccaggacaacgagtatgagctgtcaacccgtactctccgactgttggaattagaaaggcagaaatacagaattctttccgagctttccggagaaattttatttgagtataatatcaagtcagacaaactgatattttcggatcagtaccaggtgctgacagggcgggatgcaggttttgaaaatttctggcggggaagcgccaaagaacagctgattctgaaagaagatattcccagactttatgaaaagataaaagaaatatcagaagataagccagactgcaggctggagatgcagattgatctggaagaaaaaggctatgagtggtatgaggtatatctatatccaatctgggatactggcttcgagagggtatgcatcggctatatgggaaaactgataaatatccagaagcagaaaaagaggaacctgcagctgcagaaggcagcagacagtgatcctctcacagggattttgaacaggcaggcaatgcagaagaaagtatcccatcttctgaggaccaggcaaattcacgccggggccatcgggttcattgatctggataatttcaagacggtaaatgacagctacggtcatatgttcggagatgaggtcctcaagcgggtggccgtggttctaaggagtatacttagagaaacagactatataggacgaatcggaggtgacgagtttatcgtatttttcagggagatttctacgagagaagcccttgagagaaagctggagcagatgtgtgaaagcctgaggcagaatgtggacggctgtcatgtgtctgtgagtatcggcgcctcccgttatcctgaggacggagacacctacgatgttcttcttcataaagcagatcaggcactttatatgtcaaagcgtatggggaaaaatggatttcaaatctacgatgaggcctgcggcaacaaacccttccgatcccttttgtcggggatggacgagtatgacgaacgcttagagcagatggtgcaggcattaaaataatagcagacataaaccaccaggtattgacatttttagaagctatgctacaatatatggtatgtcagaacgaaagatagaaaaggactgttgcagtcaaaggcccacaggcaaaaaactgcagcggttctttttcacggaaaaggaggaaatgaatggagatatcaaagaatgccagaatggtactggaaaaacgctatctgatgaaagatgaaaatggagaggcaatggaaacggtggatggaatgttccaccgtgtggccaacgcaattgcccggggagatcttctccatgatgaaaacgcagatgtagatgccacggcggcagccttttatcatatgatgacggaactggaatttttgcctaattcccctacccttatgaatgcaggacgtcctctgggtcagctgtctgcctgctttgttcttccggtggaggatagtatggactctatctttgaggccatcaagcaggctgctctgatccataagagcggaggcgggactggattttccttctccagacttcgtccggagggaagcacggttaattctacaggaggtgtggccagcggccccataagctttatgcgggtatttaatatggcaacagaagcagtaaagcagggcggctccagaaggggtgccaatatgggaattcttagaattgaccacccggatatcctgaaatttattgactgcaaagccgataataaagagatcacgaactttaacatttctgtagggcttacagaagaatttatgcgggcagtagagacggatggagaatacaatctgatcgagccccataccggaaccgtggccggcaaatacagagccagaaaggtatttgacaagatcgtggatgccgcgtggagaaacggagagccgggaattatttttctggatcgcttgaacagggacaatgtagttccgaagcagggcgagattgaatccaccaatccctgcggagaacagcccctgcttccccacgagagctgtaatctcgggtctgtcaacctgacaaagatgttaagggagagcagagcaggttatgtatttgactgggaaaaactgaaaaatactgtgaaaaaggcagttcattttctggataacgtaattgatgtgaacaaataccctctggatcagatcgattacacgacaaaacagacaagaaagatcggacttggcgttatggggtgggcagactgcctgcttatgatgggaatcccttataattcagaggcagcagtagagctgggagaacaggtaatgaaatgcatcacggaaagcggccgtgaggccagccggaagctggcagaacagcggggagcgtttccgctcttcgaagaaagtatccttcctcaggatatgccccagagaaatggaacaatcacaaccatagcccccacagggacactctctattattgccggctgttcttcgggagtagagcccatctttggctatgtgttcataagaaatattatggatgggacagaattgctggaggtcaatcccatcttaaaaaaggaactggaaagaagaggcttatactcagaagagttaatgcggaagattgcaaaggaaggtacggtagcccatatggaagagcttcctgaggatctgcggagagtttttgtctccacccatgacatcagcccctcttatcatgtgcgcatgcaggctgctttccagaaatatacggataatgcagtgtcaaaaaccgttaatttcagcaattatgccacaagagaggatgtggcagaggtgtatacccaggcctttaagcttgactgcaagggggttaccatctacagagacggaagccgcaacgagcaggtactgaatatcggcaaggtgaaaaaggacggggaagaggaagagatagcgggaagagtagttccccgtctgcgcccggctgttgtctccgggattacggaaaaggtacagataggatgcggcaatctctatataaccgtaaactatgacgatgagggaatctgtgaagtgtttaccaacaccgggaaagccggaggctgtcccagccagagtgaggctaccgcccgtctggtctctatatctctgcgcagcggtattgatgtaaaatctatcgtaaatcagcttcggggaatccggtgtccgtccactatcaggcagccaaagttaaaatgtacatcctgcccggacgccatcgcccgggtaatcgaaaaagtctataatgagcaggtaaaactagggcgttgggctcctcctgccagcaaaatcgtagtaaagaccgaaaaagacggaaaaggcacagtgcgtaaatcagcagatccactgatccctgaacccggtgaagtccctggaaatatgcatttttgtccagagtgcggtgcatccttagagcatgagggcggctgcgtcatctgccgccagtgcggatacagcaaatgcgggtgagcgtaccggcagaaactatagaaaaaaaatatggattttatgcagttctatggtataatgtcggtaggcatgggacaaacatgatccatgtcctgtgaatgctgaaaggcaagacttaaaataactgaggtgtaattcatgaagagagtattgttgaagttaagcggagaagctttggcaggtcctaataagacagggtttgatgaagctacggtaatggaagtagcaagacaggtaaaagtattgacggatgagggaacccaggtaggaatcgtcatcggaggcgggaatttctggagaggacgaaccagtgagactatcgacagaaccaaagcagatcagattggcatgctggctaccgtgatgaactgtatctatgtatccgagattttccgctatgtgggaataaagactcaggtgctgacaccatttgcctgtggatcttttacaaaattattttccaaggacagggcgaataaatattttgacagaggaatggtagtattttttgccgggggaacaggccatccatatttctccacagataccgctaccgtacttcgtgccattgagattgaggcggagaccattcttttggcaaaggctgtggatggtgtatatgacagcgatcctaagattaatccgaacgcgaaaaaatatgaggaagtaaccatccaggaggtcattgaccagaagcttgcagttgtggatatgacagcatctattatgtgtatggaaaaccatatgcctatgctggtattcggactgagcgaagaaaacagtattgtgaataccgcccatggaaactgctccggcacaagagtaacggtatagaattcaaatgcttattaaataaaaggatttaggaggaactttatatggacgaaagagtgcaggtatacgaaaacaaaatgcagaaatcactggaaaatttaatttctgagttgggaacgatccgtgcaggacgtgccaacccgcatatcctggacaagattcaggtggaatattacggtacgccgactcctcttcagcaggtggcaaatgttaccgtgccggaacccagaatgattcagattcagccttgggaaggctccctggtaaaggccattgaaaaagcaatacttgtttccgatctgggaatcaaccctaccaatgacggaaaagtaatccgcctggtgctccctgagctgacagaggagcgcagaaaagaattagttaaggatgttaagaaaaaaggagaggcatgcaaagtggccatccgcaatatccgccgcgacgccaacgatgcttacaaaaagctggcaaaacaggatgtttctgaagatgaaatcaaagagctggagtcaaaagtacagaagctcacagataagtttggaaaagatattgacaaagttgtagaagataagtcaaaagaaatcctgaccgtataattgataggaaagacaggagaggggcacactaccataagtatcttatgggcacgtgcctctttgcgcgtagagaggagtttaggatgaatattcccaatcatgtagccatcatactggatggcaacggaaggtgggcaaagtccaaaggaatgccccggaattacggccatgtaaagggctgtgaaaatctggagaagatatgcgggattgcaaaagatctggggatcaaatatctgacggtatatgcattttccacggaaaattggaaacgatccaaagaagaagttgacggactgatgaagctgttccggaattacaccaagaaatgcattaaaatcgcaaaaaagaataagatgagagtccgtatcctgggagagccatctgctttcgacgaagacctccaggagagcatccgggaactggaggagttctccagggactatgatgaacttcattttcagctggccctgaactatggaagcagggatgagatcgcccgtgcggtaaaaaaaatgatgcgggatcaggaagcggggaaactggaatgggaaactgtaactgaggacacgatttcaaattatctggataccgcaggactgccggacccggatttgatgatccgcaccagcggggaagagcggctgtccaattttctgctgtggcagctggcctacacagagttttattttactcctgttccgtggcctgattttggaagagatgaattaatccaggcaatcgagaaatataatagtagagacagacgctacggaggcgtcaaggaggagtcataatgtttaagacacggctgttaagcgggattgtactggtgattctggctctgattacaattatttcaggaaatcttgtattattttgtacacttctgggcatctctctgatagggatgcaggagctgtaccgtgccatgggtgtgagagaagataggtttaatgccttggaactggcaggctatggaggggcagtgattttctatctcaccatccttctgggccagccgaagtatgagatgattgccctgctctttgggctggtgggtattatgtgtgtctatgtgttcgcctatccaaagtaccgtgcggaacaggttatggcggcgttcttcggcattgtttatgtagcggtgatgctctcttatatctaccagaccaggaacctggaggatggtaagtttattgtatggcttatctttatctgctcctggggaagtgatacctgcgcatattgtgtggggatgctgataggaaaacataagatggctcctgttcttagcccgaaaaagtcggtagaaggcggagtcggcggagtcgtcggtgcagctcttatcggtgccgtctatgcggctgccgtccacagtgatattgccatgtatgcggtcattggagctgtcggcgcgctgatctctatgataggggatctggcggcttctgccatcaaaagaaaccgtgagattaaggattatggtacgctgataccgggacacgggggaatcctggaccggttcgacagtgtgatattcacagcgccgtttatttattttttagcggcagtgctgttatagcgaagggaagcatatgaagaaaatagcaatcttggggtccacaggctccatagggacacagacgctggatgtggtacgcagaaatcaggatatacaggttctggctttgagtgcaggcagcaatattgaggttctggaagagcaaatacgggaatttcatccccgtcttgcagctgtatggaaggaagaaaaagcaaaagagctggcagtgagagttgccgataccgatacccgggtggtgagcgggatggatggtcttttggaattatctgtcttagaggaaacggaacttcttgtaactgctatagtggggatgataggaattctgcccacgatagaagcaataaaagcgggaaaggatattgcccttgccaataaagagacgctggtaaccgccggccatattattatgcccctggcgcagtcccggggcgtgagaattcttcccgttgacagtgaacacagtgcaatttttcagtgtctgaacggggaagacaccgggacggtgagcagacttctgattacagcttccggcgggccttttcggggaaaaaaggcagaggacctaagaaatgtaaaggtggaagatgccctgaaacatcccaactggactatgggccggaagataaccatagactcagcgacgctggtcaataaaggcctggaggttatggaggcaaagtggctgtttggcgttgaactggaccggattcaggtagtggtacagccgaaaagcgtgatacattctatggtagaatttcaggatggaagtattatggctcagttaggcacccctgacatgcgcctgccgattcagtatgccctgtatgggggaaccagaaagtatctgggcggagaacgtcttgactttttccagctggccggcattgcctttgaggcgccggatacagaaaccttccgggggctgcccctggctatggaggcttccgaagcaggaggctctatgcccacggtatttaatgccgccaatgagatggcagtgggcaaatttttgaagaaacgtatcggttttctggatatttaccgtattattgaggaatctatgggaagacatcaggtggttagcaatccaactgtagacgaaatattggagatagaaaaggatacatacaagtggattgaaagcaggtggtaaattatgagcaatatatttcatatggtaagtaacgcaggaccgtttcttgtaaaacttttggtggcaatgctggtattcagcgtcatcgtaatctttcatgaactgggtcattttctgctggcaaagagaaatggcattggtgttgtggagttttctttgggaatgggtccccgtttgatcagtacagtgaaaggggaaaccaggtattccgtaaagcttctgccctttggcggttcctgcattatggtaggagaagacggggacgaacaaggggagaatacgtttaacaatgcccctatctggggacgtattgccgtggtagctgcggggccaatctttaacttcattatggcctttgcatttgccatgattattgtcagtgtggtgggatatgatcctgccgaggtgatggaagtgccggagggatccccggcggcagaggcgggtcttcaggccggagacataatcacggagtttgagggccgcagcgtagatatcgccagggatatggatacgtacattgcccttcacggacttaccagcgacgagataaaccttacctacaccagagacggaaaagagcagtcaatccgctatcaggcggagagtgtggaaaaatatatgcttggtttcggctatacgcctgacggcccggcagaaattaccagcctgtccagaggactgcctttggaggaagccggtcttcagattggagatgtgattaccagtatagacggaacccccattggagatgccaatgggctggtaaagtatctggaggaaaatccccttagcagccagagagtaaccatcgggtacgagagagacggcaaagaaaaggaagtatctgtagttcccaggatgaataagaatatctctctggggttcgcttataatctgggcagggagaaaacgaacttcctgggtgtcatgaagtatagcttcatagaagtaaaatattggatccgtaccacagtggaaagcttatttatgcttgttaaggggcagtttaccgtaaacgatctttccggaccagtgggaatcgtaaatgccatcggcgactcgattgatcaggcaaagccggaagggacgaagatggtttccctgcagatgatttactgggccatccttctgtcggcgaaccttggggtcatgaacctgctgccgattcctgctctggatggaggacgccttgtcttcctgataattgaagccatccggggcaaggcactgaaccggaatgtggaaggtatggttcattttgccggatttatgcttttaatggcattgatggtatttgtaatgtttaatgatatccgcaaactgttctgagtttaataggatgtatagatatgcgcagccggaggcagacaaagtcttccggctgcgtttttttattacataggaaacttcgttccctatgtaataaaaaaccctcggggggatcacactgctgcggaaaggaaggtgctgtctgcgacagcccgccgcaggcggagaatgcgctttcgcgcaatctttcttactgcccaggaaactgtgcttctgcgagggaatctgaataaccggatgctctcctatatggagatccccatcttggtgtgtctgggaagagattctctgtaagtctcgtcaattctgatatgcgcttcaatcatctcttccagcagcttttcatctcttttcttcaaagcggtaaggattgccaggtgttcttcgtaagttttttggtattcggctttctcataggtgacctctgccatcccctgaaagtactgctgaatcagaacaaaaagggtctgatacaggtatttgtagaggatattgtcggaaagatccaacagcgccatatgaaaattgctgtcataagccgtgagaagttccacagatagttccttgccaggttccatgtgggcctggggaggaataatggaggattctagctgcagaatagcctgatcagagacatttcgtacgatatatttacatgcttccgtttccagaacctttcggagctgtagaagatcgtccagctttcctttgctcaaggcaaacatgatacagagggtattgttgatcgtgttttccggatgttgggtgatatagttgccgcccccctggcggctttccaagatccccataatttccagggccttcagtccttctcgaacagacgagcggctcagtgacatgttggcagccatatctcgttctgtaggaagcttgtccccgcattccagctccccggtgagaatatcctgctcgatttttctgaatacttcgttgcaatttgtggtggtttttgtgaattccatagtttcttctccttttagaaagttaaataaataacaggatgaaatgtatttacgttttagcggttatagtgtataataatattataacgattggtcagaccaatttcaagagtaaatttacttttacaccagaataattggcgggcatgcggctatgccgtatgacaatgtataaggaggttaatgatatgaaggttgtatttgctgagtatccagagagtagaaacagggatattaaaacagagcttatgtatctgccggacggcgcaaagatcggattcgcggtgtatgacgaagatcatctggaggcatattatgaggctttagaagacgcagatgccgttttgacggggtttgccccccttgacagaacggcgattgatcacttgaaaaagtgcagaattatatctgtgcaggcaacaggctggaatttcgttgattctgattatgctaaggcgaaggggattgctgtatgtgcggtgggagaatattgtacacaggaagtagcagatcatgcgatggcacttatgctggcactttgcaagatgtttccctatcatacaagaagaataaaccaggataaggcatgggagattgagagcttaaaagatcgtgaggtccgacggattgaaggccagactctggggattgtaggattcggaaagattggccgggccgtggcgaaaagggcgcaggcctttgggatgagagtgattgcatatgatccttacattgtggctaaaaccgccaatgatatgggggtattgctgacggatattgacactcttctgggaagctctgatattatcaccatccatatgaacatgacggaagagaatgaatgctttttcaataaaaatacctttgctaaaatgaaaaagcatccttttatcattaatgtggcaagagggggtatgatcaatgaggaggacctggcggaggcgctggataaggggcttgtcagaggcgcgggtctggatgtgctttacagtgaatcccctgaccttgcaaacagccagctcactaacagggagaatgtgattataacaccccacagtgccttttattccgatgattccatcgaagcctgtgagagaatctctatggaaaacatccgttattacctggagggagaaaaagacaaggtatttaaactagtatgacaaaaaagtaaataaatgggccgggaaccatgtgtccccggcccttgttgcggcagcagctactgaagttccgcaattcttgtaacgcctacaaagatttcctgtatcttataccaggtgcggtaatctacgattccggtctgagggagaccgaaaatactctggaattctcggactgcattctgtgtgccctccccgtagatgccgtcagcagcaatggaaggaatcgcagtgtatacctctccgatggtattaagctgttcctgcatctggcgtaccttgtctccgctggcgccgatatccagattatagccgggccatgaggcgggaacccctgaaacctcctctgcggagttaatgtacatattgtcgccgtaatagtgccggaggatttcaatggctgaataattttgatcccccaggtattttgaaccccactgactcatccagttgggacaggagaccctctgtccgtcgcagtactgtgtcaggataggctgtttaacattcggccgtgacagataattggagaataattcatctacaatatcggaaatgctcttgaaaatatttctgccgtacataaatttgtgatcataggctgtggaagaagtaatggtaaaatcataccctttgttccgataccactctgtgtaaacacgattcagggtaaaggacataatggccagaacatttgcacgtatggtattatccggccaggtggcgtagatctcactggatgcaacattcttgatatagtccctgtatcggatataatagtttgctgccgttgaatcgctgggggcgccgtcgtgcactacgacatattccgggattacaaccctgctcagaacaatttcccccgattcattggtgggtttaatttcatcctcaggaatcttgggagggtattctccatacagggtatgagccggaatcacgatgttttgaaattgttctccgggcgctgtgggctgcatacgaaccggaagaagtgcctcggcttccgggagaacttctgtgccggagacgtcgataggctcaaagccgtcagcattgatctgaactgtgtattccgaatagggctgatactctgagggagccatgctgtaatccagcggaggtgccggaagctcgatctcaggtgtctgtccgtttgcatctgtggttaattcttcgatagggctttcgggatctccggagtaggagatagtgacctttgcatttgtgatgggcagattccggatggaggactggacagttaccataagcctgccccgatccacccgattatcctgcatagcgcgcatatgcgaataattcataagtacctcgcaaaatagaaccttcgtaatattttatgcagcagtctttaatatgtacctgtgaatcacttttctggaaaaattcagagagaaactcatatcctttgccttttgtgggaatcatgagtaagagaggcagattttacattttacatttatttaacatgcccaggcttttggattttacaagggattgttactatctaaatgtattaagtgaagcaaacaacaaaaggagtaaaaggttatgatgaaaaaattagtagcaggacttttggcagcaacgatgacccttggcatgttggcaggatgcggagataacacaggggataccaacagcggcacacagactgagggtacagacaacacaggagatacggatgcaaaggatacgtctggaaatagcaatcccatcactgttatttcaagggaggacgggtcaggcacaagaggagcgtttattgaactgtttggcgtggaagagaaagatgacagcggggaaaaagtggacaacaccacacaggacgcggaaatcaccaacagcacaagtgttatgatgacaagtgtggctggaaatcctgatgccatcggttatatttctctgggttccctgaatgacactgtaaaagcattaaaaatcgatggggctgaggcaacggtagacaacattaaaaacggtacttacaagatttcccgtccctttaatattgctgcaaaagaaggcttaagtgaagtggctcaggactttgtggactttatcttaagcagtgaaggacaaaaggtagttgaggatagcggatatatcactgtgaacgattccgcagaagcatatgccggcagcaaaccgtcaggaaagattgtagttgcaggatcttcctccgtaacaccagttatggaagcgctgaaggaggcatatttgaaagtgaataccggagctgaaattgaagtacagcagagtgattcaacaacaggtatgcagtccgcgatggatggcatctgcgatatcggaatggcttccagagaactgaaggactctgaaacaggcggcggtctgacagcaactcagattgcgctggacggaattgcagtaattgtaaacaaagaaaactcagtagaagacatgaccagtgaccaggtaaaagctatttacacaggcgagacaacatcctggggagatattcagtaatcattttacggcgaaagagttgtggcagaaacaagaggccgcagccctttttcgcgttgaaggagcgtaaaacatgaaagacatgaaagaaacaataatgaaaattatcttcctgatatctgcctgcgcttctatactggcagtggcccttatctgtatcttcctttttgcaaatggaattccggccataggcaaaatcggagccggggaattccttctgggaaagacctggagaccgaataataatctcttcggcatcttccccatgatactgggcagtatttatgttacggcaggagcaattatcgcaggcgttcccatcggaattctgacagcaatttttatggcaaagttctgtccaaaatggatgtaccggtttatgaagcctgctgtggacctgctggcgggaatcccctcagttgtctatggctttttcgggctggtagtaatggtccctcttgtgcggcagttctgcagagcatttgagctgaatggcaacggcagcagtatatttacggcatctcttcttttgggaattatgattctccccacagtgatcggcgtttcagaggcggcaatccgggcagtgccggatcaatattatgaaggggcgcttgccctgggggcaactcatgaaagaagtgtattttttacagtgcttccggcagctaagtcaggcattatggccgcagtggtactcggggttggaagagcgatcggagaaactatggcggtgattatgattgctggcaatcagccgcgtatgcccaagggactcttcgaaggggtcagaaccctgactgctaatattgttttagaaatggggtatgcggcggatctccacagagaagcgctcattgcaacagcagtggtactctttgtgtttatcctgattatcaatctattattctcgttacttaaaaggaggcagaaataatgcaggcaatgaataagcaaacctggaagcaaaaagtaaaagcctatgggagcagccctttgtccctgtttctgctgattatagtgacactggcgtctctgattacggtatgtgctcttctatttctcattggatatattatgataaaggggattccgaacctgacgccgtctctttttgcatggacatataatacggagaatgtttcactgcttcctgcacttatcaataccatacttatgacactgttatccctgctaattgcaggccccctggcaatttttgctgcgatctatctggtagagtatgccaagcggggcaataaattagtagaaattgtgcgtgtgacggctgagactctgacgggaattccttctattgtatacggtcttttcggcctgctgttttttgtgacaacactgaaatgggggttttcccttcttgcgggcgcatttaccctcgcaattatgattttgccggtaattatgagaaccacagaggaggcgctgggcgctgtgcctgatacgtttcgggaagggagctttgggctgggggccggacgtctcagaacagtctttgtagtggtccttccgtccgctgtccccggaatcctttccggagtaattctggctatcggaagaattgtgggggagacagcagcccttatgtatacggcgggaacggtagctgaagtgccaaacagcatcctgtcttccacgagaactctgtctgtgcatatgtatgccttgtccagtgaaggcctctataccgatcaggcgtatgccactgcggtggttctccttattattgtactgctgattaactggctgtctggtgctctggccaaaaaagtgaagaaaggataaagacatggataagtttacgatttcaaatctggatttatattatgatgattttcatgccctgaaggatgtaaatctgaatctgccgcccaacgaaataaccgcctttatcggcccctccggctgcggaaaatcaaccttattaaaatctctgaaccggatgaatgatctggtggagggatgcagaatcacaggaaaggtgctgctggacggggaggatatttacggggatatgaatgtgaatcatctgcgcaaaagagtgggcatggtgtttcagaagccgaatccattccctatgagcatctatgacaatattgcatacggtcccagaacccacggaattcattccagggcaaagctggacgatattgtagaaaagtctcttagagatgccgccatctgggaggaagtgaaagaccggctgaaattaagcgccctgggcatgtccggagggcagcagcagcgtctctgtatcgccagggcgctggcggtagagccggaggtgctcctgatggatgaacctacctcggcgctggatcctatctcgacctcaaaaatcgaagatcttgcgatagaattgaaaaaagattatactattattatggttacgcacaatatgcagcaggcggcccgtatttctgacaaaacagtattcttccttttgggagaggttattgagtatggggagacagagcaggtattttctgttcctaataacaagaaaacagaggactatattaccgggaggtttggataatgagaatcaggttcgaacagcagcttgaacagctgaatattgaattaatcaagatgggcgccctgtgtgaatcagccattaataaggcaaatgaagcgctgctcaatgtggataaaaatgaagagtgcgtggcagaggttttggggattgaggatgaaatcaatcagaaggaacgggacatagaagccctgtgtatgaagctgcttctgcagcagcagccggttgcccgggatctgagacagatttcttctgcgctgaagatgatttctgatatggagcgcattggagatcaggcggctgatattgcagagatttccaaatatgttcaggtgcgccaaaatgccagcaagattcatattggagacatggctaaggcgactactaaaatggttacggagagcattgattcctatgtaaaccgagacctgaaaatggctcaggaggttgtcaggtatgatgacgtggtggatgatctgtttcaggaggtaaaaagtgagctgattgaactggttgtaaaagacagccagaatggagagttttattttgatcttatcatggttgccaagtattttgaacgaatcggtgatcatgcagaaaatattgcccagtgggtagaattttcaattaccggaaagcatgagttttagataataaggataggatggaggaacgtatgatttatttggtagaagatgatgacagcatacgggaactggtgatttacacgctgcacagcacagggtttgaagctgtgggatttatgtgtgcaaaggacttttggaagggaatagaaaagcagatgccggccctggttttgctggatattatgctgccggatgaggacggtcttcagatcctgaagaagctccggggaaatacttctacaaagaaggttcctgtaattatgctcacagcaaaaggcacggaatatgataaagtggtagggctggacagcggtgcggatgactatattcccaagccttttggcatgatggagcttgtatcccggataaaagcagtcctgcgccgcacggagccggtgaaggatgaaaacgtatttgaagccggcagcatatctgtggatattgacaagcacctggttatggctgacggaaaagaggttacacttaccctgaaagaatttgaactgctctgttacctgctgaaaaacaaagggtttgtgctgtcccgggataagattctttcccgtatctggggatatgacattgatgtggagacacgtacggtggatgtacatatccgtactcttcggcagaagctgggcggctgcggagaaatgatagagactgtccggggtgtgggataccggataggaggaaccagataatgagaaaaaaaatctttgggaatatgtgtgtgatctctatactggctatcttagtcacttctatcttcgttgtgggtgtattttacggggattttgtagagaagatgaagagcgaagtggagacagaggcaggatatatcaaaactgccgtggaacagatgggagaggagtatcttgatgagatcctcagccagccggaggtaaacagaagaaaccgtatcaccctggtaaacagtgatggcacggttatttttgatagttattataatccccagtccctggaaaaccacaggaagcgccccgagattcaggctgctctgacagaggggacagggaggtgcagcagggtatcagataccctgcagcaggagacgtattattatgccctgaagctggacaacggtatggtacttcgggtggcgaataccagcagcagtgtatatgccagcctcctgcgggttattcccctggttcttctcatctgtgttatagtatctgcaattaccatgctgatagctacccgccagacgaaaaagattgtacagcctatcaatgaactgaatctgaaaaaaccggaagagaatgatacttacgatgagctggcacctttgctgggcagactggaaaagcaaaacaagaccattaagcttcaaattgaggaactgaaggtgaaacaaagagagtttaccgcgctgaccgaaaatatgagtgaaggatttttggtgattgaccaggatggaaatgtactctcctacaacagcagcgcactggagctcttggggatgaaacaggccatcggagagaaacaaaatatacttacctttaaccgcagtgtgggactccagaatgtagtggacgaggcgctgaagggcaatccaagtgaacaggaaatacaggtagaggggaaatactgccagatcatggcgaatcccgtgaccagcaaaaagcagatcaaaggcgcggttattgtgatcatggatgttacagaaaagcagcagagagagcagatgcgcagggaattttccgcaaatgtttcacacgagcttaagacgcctctcacatcgatctccggatatgctgagatcatgaaaaacggcctggtaaaacaggaggacattcccagatttgcagagaatatctataaagagaccgggaggctaataaccatggtaggtgatattataaagctgtcccagctggacgagaaccaggtggctctgcagaaagaagaggtggatttgtattccgtggcaagagaagttgtggagcgcctgcagacaaccgcctccggccatagtgtcactctctccctgctgggagaatccagaaccgtaaacggagtgcgtcagatactggatgaaatgatatacaatctctgcatcaacggcataatctataaccgggaaggcggatatgtacaggttcgtgtagaggacagagaggggcataccgtactggcagtcaaagacaacggtattggcatccctcagtcagatcagcagcgagtatttgagcgtttttaccgggtagacaaaagccactcaaaacaggtgggaggtacagggctggggctttccattgtaaaacacggggctatgtttcatagagcctgtatagagatggacagcattcagggaagcggtacagaaatcaggatagtttggtagagggaaaaggggggacgtgttctttctagaaagaacacgtcccaaaatcgatcaggcctgtccccaaatatgggatatgcatattttttatcaaaatagggatatatttatatagttcatgggagattattattttacttatcaaccctcaggacgtatactgatggaagaggaggctttcaaagatggaaaagggaattataaaaaagctatttttatccaccttttatctgagtgcatttacgttcggaggaggatatgtcattattactttgatgaaaaagaagtttgtggatgaataccactggatggaggagcaggagatgctggaccttactgctctggctcagtcggcccctggggcgattgcggtgaacgggtctcttatagtaggatttagaatcgcaggtttcagaggggctctggccgcagtagcagggacagtactgcctccgttttttgtgttgtcgatcgtttccatgttttatgcggcgttccgggataataagatggttagtctggttctggaaggaatgcaggcgggagtcgcagcggtaatagcagatgtggttatcgatttgggcgccaagattacgggggagaagaatgtggtatctctgctgattatggcaggggctttcctttgtgcttatgtgtttcatataaatgtgattattatcatactggtatgtgtggggattgggaccatacgtgggctgtggaatatgaggaaggatgggacagaatgatttatataaaattatttctcagttttcttcagataggcgccttcagcatcggcgggggatatgccgcccttcctctgatacaaagtcaggtagtacatattcagcactggctctctgcgggggagttcacggatctggtgacaatttcacagatgactccgggcccaatcgccattaatgcagccacatttgtgggcctgcgtctgggcggcttattgggggcagtgattgctacattgggctgtatcctcccatcatgtattatcatgtcggttctggcctatttttatttcaaataccgggagctggaagtacttcagacgattctgcaggcgctcaggcctgcggttgtggcattgattgcttctgcgggccttggtattttggtacaggcactttggagcgacagcagccgggggatttcctttgaaacgctgagcctgtccggaggagcaatttttgtggtttccatggttttgctgagaaaaagaaagatgaaccctataaaggttatgggcatcgccggggcgctgaatgttgtcctccactatgctgcagtgatactaaaataaatggtttttcattgcaaaccggccggaggaatagtacaatcacagtaagatgattcgcgtgacacataagaatatgaagttgtaaaggaggatgccaatggaacgttttgtgatggatgactttcaagtacagatatccatagagacactgtcggagaagctgcatctgacagagcaggacgatgtggaaatgatgggagaaaagctgcaggatgcccttcggactgcaaagcctaaagcagtgtataaaatctgtgaggtgacggaaattgatggggataaagtaaccatagaggataccgaattccaaagccctacccttgcggccaaactaaaaggtgttcacaatgtctttgcctttgtagcaacctgtggtacagaggtggatgagtggagccgccgggaggatgactacattgtgaatctttggctggatatgctcaaggaaatgatcctggtagaggcgcgaaagcagttccggaatcgtttatccgaaaagtacgggattaaaaccttcggcgttatgaatcccggatccgggaacgcagacacctggcccatcagacagcaggctcagctgttctctctgataggggatgtcaaagaacttacaggtgtggaattgactgggggaactctgatgtatcctacaaagtcagtctcaggaatcatgttcccatcagaagaagattttgtcagctgctccatctgcaagagggtgaattgccagaacagaaaggcaaaatatataggagcataataagcaaattacccatttaaaccggaatcgtttaaatgggtaattagtttgtcctgattttttatctttgtacacggccgcttgtattgccgcctgcaagagaggtgacttcatcgggggtaaccagattaaaatcatgctcaatggtatgcttcagacaagaggcagccgctgcgaattccacggcttcctgagaagaatagccggagatcagagagtagataagccctcctccaaagctgtcgccaccgcctacacggtccacaatgtgaatggaataagtacgggagaaaaaggcattcttaccgtcataaagcatgccgccccagttgttatccgtagcggacaggcttccccgcagtgtaatggcagcttttttacagccgaactgccggcagattttttgcgctacgccaatatacccgtcctttgaaatattaccggtttcaatattagtattttcagcatgaataccgaatacatcggcggcatcctcttcatttgcgatgcagacgtctacgtatggcagtaatctgctcatgacctcctttgcttcatctctggaccatgattttttgcggtagtttaaatcgcagctgaccgtcagccccatttccttggcggctttttcaacaaaataggtgccaagcctgggaccgccgcgaagaaccgatgaggtatctacgccataacggcgcagagcgttaactgcggactatccgatctcgtgttccggcacctttgatactcagatgcgaagcttccccgggcggcaaaagaaaaaggattccagtcctatgttggaaaagccatgagttcatgccagggaatccgggcaatggagatctggacgggaaagaaaccctcagatgaggatgccagaaggctggtggcctccgtcgagatggaagcgtgataaaaaacaggtgctgaagactcttatcagagtccgggcacctgttttttgcgtctcctttgcaggtctgtacgggtataatacaggatcaaaggctgcaacatgaaataaagcattgatgtccgaacaaatgtttgataaaatagtaatgatgatttatagaatttcgtatataagttgtccacaggaaaataagaattaaggatcggtaaggagtggtatagatatggaacagatgacgttatttgatgacagaggccggagcgctcccctggccagcagacttcggccggagcgtctggaagagtttgtagggcaggaacatctgctgggggagggcaagatgctgcgccagcttatagagcgggatcagatatcctccatgattttctggggcgcacctggaataggtaaaacctcacttgcgagcatcatagcaaaccgcaccaaggcagattttataaattttagtgctgttaccagcggaatcagggagattaaggatgtgatgagccgcgcggaaagcagccggagaatgggaatccgcacggtattgtttgtagacgagattcaccgtttcaataaggcacagcaggatgcctttctgccttatgtggagaagggaagcattatccttatcggtgctactacagaaaatccttctttcgagattaacgcggctctcctgtcacggtgtaaggtatttgtactcaaggcattggaagaaaaagatctggtaaaacttctgacgcatgcacttaaaagtcctgccggattcgggggacagaatatccgtattacggaccgacagcttcaggctgtggctgcctttgcgaacggggatgccaggattgctcttaatactctggaaatggcggtgttaaacggtgcaattgacagcagcgggggtgtcactgttacagatgagggaatgtcacagtgtatcagcagaaaatcacttctctatgacaagaatggagaggagcattacaatctgatctccgcacttcataaatctatgcgcaacagcgatccggacgcggcagtgtactggcttgcgcgaatgctggaagcaggggaggatcccctttatgtggccaggcgtctgattcgctttgccagtgaagatgtgggaatggcggacagccatgccctgaatctggcagtctctgcctaccaggcatgccactttaatggaatgcctgaatgcaatgtgaatctaacccatgcagtcgtgtacctgtctatggcaccgaagtccaatgccttatataccgcctatgaagagtgtaaaaatgatgccatgaatcaccttgcggaaccagttccccttcagattagaaatgctcccacagggttgatgggtgaacttcactatggggaagggtatgtatatgcccatgatacaaaggagaaattgtctcgtatgcagtgcctgccggatgccctgaaagacagatgttactatcagcccacatctcagggggaagagaaagaagtaaaggaaaagcttgacagaattaaggcttggaaaaaaggggaaaaaagttgaaaaaaattctgaaaaggtgttgacgaaacataaactggatgctataatatcacttgtcgttcggcagtaaagccaaggcgataagcgggagtgctggaattggcagacaggcaagactaaggatcttgtgggtgtatgctcgtgtgggttcaagtcccatctcccgcagtagaatctctgtaaatgcagtttacagagatttttttgtgtctaattgggatttaagggtgtagcgcttggacttcagcttaaagtgattcaagtcggaaagtgtgaggtggcggggggacggtgagagaagttccagggggggcgctatctatccaaaacatcaagcggacaatggtgcgaaataagaggaaaagtgtacaactcccaacctttcccccgttttccgtgaatgtgaagtgagtctctgccaggtcaagggaggaggtcttggggccaggggtactgtgtggagctgcgcagactacggagtgcgtccgaagatccactgtcggcggtcacttaggagcgaaggctttcctgagcttcttagtgaacggccaggcagctagctgaggagaaacgcagtagcaagcagatccacacagtacccctggccccaagacctcctcccttgaccgtccgtctgcgacactccgctcgccgactattttatctcgaactttacatacacaaaacaattacacaaaactaaaatttttctttaatcttcctctcccccaactccaatctctgttccagatccctttcccctgaaagaatactcttaaaccgcctcaactcatctaaaagtccctgtccatggggaaccagataagcgcctgcgtcgctgcccaaagccatggtgacgccggctttccaggcttttcttatgttatcaccggcttcctgccagatgctttccagaacggtgtccgtaaaccgcccgcagcctatgaggttaggaactacagtgaccgtaggcacccacacagcctcagactgggaaaaggccaggatgcactcatcatccatgtaattgccgtgttccacgctgtccacgccggccagcagggcatcgtatacagggccggctccgttggtatgggtcatgaccgcaaaaccttcctcatgagcgatatgcaccatttctttaaccagggcatagggcagggcatcccccgtgatatggccgtccgtatcgaagtccatgattcccgttgtcatgatcttaataaaatccccgccctgcttctttacctctctgacaagggcagtatattccggaagagtgtcgaagcccctgcctacaatgcccccgtagtggccatttttatgtattgcaaatataggagtgcggtagtcgattccgtaagagggggcaatctcccgtgcccgcctggatacacctaagctgtccccgccgtccctgacaaaccggatacccagtttttgataggctgaaaaatgggcatgaattacagattcgtctacaccggtctgatggcggtttaccgcatgtttatagttaacagcgtccataataatatgggcatgacattctccgaacatagtatctcttctttctttgtgtgatttgtgatagaataggagctgttaagctcaaataataatatatcagatattgcatgaaatgttaagaaaaaggagaattatgatgttaacaataggaagccatttatcatctgcaaaagggtatgaagctatgggaaaagaagccttgaaaatcggtgccaatacctttcagttctttaccaggaatcccagaggggggaaggcaaaagagatacggccggaagatgtgcagtcttttcagaacctctcccaagcccatgggtttccctgtattctggctcatgcaccctataccatgaatgcctgcggagcagatgaaaaagtacgcacctttgccattgaaaccatggcagacgatctcagaagaatggagtatacaccgggaaattattataactttcatccgggaagccacgttaagcagggggctgaaaaagggattgctctgattgctgatgtcttgaatcggaatctgaggccggaacagtccacgactgtgcttttggagactatgtccggaaaaggaagtgaggtaggacgaaacttccaggaactgcgggagatcctggatcgtgtggaactctcggataaaatgggagtctgtatggatacctgccatgtatttgacggcgggtatgatattgtaaatgatctggatgaagtgctgacggagtttgatcaggtgatcggactgaagcgtttaaaagcgatccacttaaatgacagtatgaatgagctgggcagccataaggacaggcatgccaggataggggaggggcatatcggcaaagaggccttgatccgtatcatcaatcatcctgcactgagagagctgcctttttatctggaaacgccaaatgatctggagggctatgccagagaaatccagcttctaagagaggcataccgttaacggcagaccgtataaaaataaccagaaagtataagaaaaagaaaataatattgttcaatcatctgaaattagtggaaaagtgggaggcaatattaacagaggatcccagttgtgctatcataaagggcgaatggctattagagtgtaacagaaagaagggtcttaattattatgaagtatgtaaagcaaattgggattatcggaggcattacctttgcaggggagctgctgaattatctgctgcctctgccggttccggccagtgtgtatggaatgattctgctgtttctggctctgtgtatgagattcgttaaagaagaacagataaaagaaactgccgattttctgctggtgctgatgcctgtgatgtttacagggccaagtgtgggagtaatagagaattacgccagtatatcccaggggctgctggggtttgctgtgattattgtaattacaactgcggcaattatgggggtaacaggggcagtcacccagggagcaatgcggctgtgcgcaaaggtgaaaaaaacggaaaaagagtcagggggtgaggattatgaatgcggtgtttgagaattcagcatattttggattctttcttaccctgctggggtatgggctggggctggcagtccagaaaaaaacgaaactggcagtgtgcaatccccttcttatctccactgtatttattattgcggtgctgcttgccggcaggattcgttatcagacgtttaaccagggggcgcagtatatcacgtatctgctcactccggctacggtctgcctggcactgcctttgtaccggcagctcaggattctgaaagagaaccttgtgcctgtactggctggacttaccgcaggtacagtcacctgtatggctttgattggagggatggcctgcctgctgcatctggaacgaaccatgaccctgtctctgctcccaaaatccatcacaacagccattgccattggcgtgacagaggagatcggaggcctgtcaggtataacagttgctgcggtggtaatcacaggaatacttagtaccgtggtcgccgatctggtctttaaggtatgtcgtatcaaagaccctgtggctcagggacttgcactgggagcttcaggacacgccatcgggacaagcaaagctcttgggatgggtgaggttcagggggctatgagcagccttgccattgtagttacaggaatcataacggttgttttggttccgatggttgccagatttatataggagcagaaatgcggatacctgtctgtgagcagatacagacagtatccgtatttttttactctgcagggcgggctctataaagcaaaaattactgggaggaggcaccatacaaaataaggccttttcttacaaaaaagaggaaatttttgtattttgcggaatatattaaatatagacactttgattttacttgttcccatggaggtgcaaagtatgacaattcgtgaaagttttgaagaactggagatggaacttctgagtccctatgcctcttacagcagacattcaagaggacgcaggaggcatgaagaagagtgtgatgtgcgaaccgtctatcaaagagacagagacaggattctgcattccaaggcgtttcggaggatgaaagataaaacacaagtgtttttgtctcctcagggggatcattaccgcaaccggctgacacataccttagaggtgtctcagattgcaagaaccattgcaaaagcactccgtctgaatgaggatcttgtggaagctattgctttgggacatgatctggggcatacgccctttggacatgccggagaaaaggtgctggacactatatgtcctctgggatttgcccactataaacagagtgtgcgggtggtagagcggctggaaaagcggggagaaggactgaatctgacctgggaagtactggatggaatacgcaatcaccgaactgcgggaagccccagcacactggaaggacagattgtgcgctactgtgacaaaatcgcctacatacaccacgatatggatgacgcagaacgagcggggattatcagtgaggataacattcccatcacaatccgaatgcttttggggtacacgaccagagagcggctcaatacctttatccatgacattatcagaaacagccaggggagagacaagatcacaatgtctccggagatagaagagggcatgcgggatctgaggagcattatgtttcaggatgtgtatctgaatcctgtggcgaaaaaggaagaagagaaagcctgcaatatgatagaaaagctgtatgaatactacagcttacatgaaacagctatgtcccaggagtatgtggaactaatacaaaacggagaggaaaaggagagggtggtatgcgattacatatcgggaatgaccgaccaattttccattaataagttccgggaaatctatattccgaagggatgggaagtatattgacaggaatttccgacaaaaaaatgagaaaaaggaaaaggaaaccgggaagtaacgtgtaatatagcatatggaggaagaacatgtattattcagatgatttaattgaagagatacgaatgaaaaatgatatcgtggatgtcatctccggctatgtgaagcttcagagaaagggaagttcctactttggtctttgtccctttcacaatgaaaaatctccttccttttctgtgagccccggaaagcagatgtattactgctttggctgcggagccggaggcaacgtatatacctttattatggaatatgagaattatacctttgtagaggcagtcaaaatgctggctgaacgtgccggagtggagcttcctgagatggaatactccagagaacagaaagcgcaggctgaccggaaggctctcttgctggagattcagaaacaggctgcgaacttttactattaccagctccgccaggaggcgggcagacaggcttacggctatctcaccggcagaggtctcagtgacgaaaccataaaaaagttcggactcggctattcgtctaaatattcggacatgctgcaccggtacctgaaacaaaagggctattcggatgagctgttaaaggattccggcctctttcagtttgatgagaaaagaggaatgcatgacaagttctggaatcgtgtgatgtttcccattcaggatgtgaacggccgggtgattggattcggagggcgtgtgatgggggatggaaaacccaaatatctgaactctccggagacaaagatattcgacaaaagcaggaacctctatggactgaacatcgccagaacctccagaaagaaaaatctgattatatgtgaaggttatatggatgtcattgccatgcaccaggcaggatttaccaatgcggtagcttctcttgggacagctttgacgtccgggcatgccagcctgatgcgcaggtacacagaggaagtcctcctcacctatgacagcgatgaggcgggaagaaaagcagcactcagaggaattcccatagtgaaggccgcaggactcaaggccagggtggtgaatctgtccccctataaggatccggatgagtttatacaggcactgggaagggaagcttttgaagagcgtctggatgaagcaatgaacagttttctgttcgaaatctctgtgatggaaggggagtatgatcttggggatccccagggcaagacggatttttaccgggcaatagccaagaagctgctggaatttccggaggagatcgagcggaacaactatatggaatccattgcatctaagtaccatattgcctatgaagatttgaagcggctggtgaataagctggccctcagcggaacaccggcagaggagagaattaagcctaaatccggcattcacaaaaaaaacaataaagaaagcggaatagaaacgtcccagaagctgatgctaacctggcttgtttcctatccgtccatgtttgacacggtgagaggctatattggcccggatgattttaccacccctctgtaccatacagtggcagagcttttatatgaacagcacgcacagggtgaagtgaatccggcaaagctactgaaccggtttacagacagtgaagaacaaaaagagatcgcctctttattcaatgccacacttcatctggagacagacggagaacggcagcaggcattaaccgatacggtatgccgaattatgagaaatagcatcgaatatcggacagcacacctgtctcccactgatatgcagggtttacagcagattttggcggataagcgcagattagaggagatagaggcaaaacgggtgatattgcatatttctttcgattaaggataaaatataaacaagttatgagaggatggaacacctatggaaatgaatatggcaaaattcagtgaaaaattagcagagcttctggaaatgggcaaaaagaaaaagaatgttctggaatatcaggagattaatgactttttccgggataccccgctggatgctgaatatctggacaaagtctttgactatctggaagccaatggaatcgacgtgctgagaatcagcgatacggatacggatgtgctgttgctggacgatgatgaagatattaagttggacgaagaagacgaggttgatgtagagaatatagatttgactgtgcctgaggggatcagcattgaggatccggtgcggatgtatctgaaagagattggaaaggttccccttctgaccgcggaggaagaaattgcgcttgcccagcggatggaagacggggatgagaatgccaaaaagcgtttggcagaggcgaacctccgtctggtggtgagcatagcaaagcgctatgtaggccgggggatgctgtttttggatctgatccaggaaggaaatcttggtcttatcaaggcagtggaaaagtttgactacagaaaaggatacaagttcagcacctatgccacctggtggatccgccaggcaattacaagggccatagccgatcaggcccgtaccatccgtattccggttcacatggtggagaccattaataaactgatccgggtatccagacagctccttcaagagcttggccgtgaacctctgccggaagagatcgcagaggagatgaatatgtcagttgaccgtgtgcgcgagattcttaaaatttcacaggagccggtgtccttagaaactcctatcggagaggaagaagacagccatttgggtgattttattcaggatgacaatgtacctgtgcccgcggatgcagcagcatttaccctgttaaaggaacagctggtggaagtactgggaacccttaccgagagagaacaaaaggtgctccgtcttcgcttcggcctggatgacggccgcgccagaacattggaggaagtgggaaaagaattcaatgtaaccagggaacgtatccgtcagattgaggcaaaggcccttagaaaactccgccatcccagccgcagccgcaagctgaaagactatttggattaatacaggagaaatcgtatgcagttatccaacaggcttttagctgtggccggcatggttacagagggaaacacagttgcagatgtaggctgtgaccatgggtatatccccatttatctgatacagcagaaaaagataccatgcgccatcgccatggacatccggagaggccctttgtcccgggctgaggcacacatagaggaaaatgggctcagggaatacatacagacacgcctgtcagacggtgtacaggccctgaagcccggagaagcagacacgcttatcattgccgggatggggggaggtctggtacagaagattctcagggacggcgaagaagtcctccgcagtgtatcggaattcattcttcagccccagtcagagatccgccaggtacgattctttctgcagaaaaacggatacttcataacagatgagacaatggtgctggaagatggaaaatactatcccatgatgagggctgtccatggagagatggaatatacggaagagatttacttaaggtacggacgagaactgcttcagtccgggcatcctgttctgagacagttcctggagaaggaaagagatacctgcctgcagattctggatacgctttctttatccggaacctctcaggcaagagaacgggaaaaagaaattcaacaggagatgcagtatataaaagctgctttacaacactatgaaatgtaagaaaattatacagacgctggagagattgtatcccccgtcctttgcagaggattgggacaacgtcggactgttggtgggagatgaggaagcagagatatccaggatatttcttgccctggatgtgacggatgagacattaaatgccgcagtaaattttcatgcggatctgatgataacccatcatcctatgatcttcagcgggatcaaacaagtaaacgccgggaattatctgggaagacggatcataaaaatgataaaagaggacatatcctgctatgccatgcacacaaattttgatatctgcggcatggcagaactgagtgccgggtatcttcagctgaccgacacctccgtgctggatgttacctttgaggacagcggcagagaggaagggattggaagagtgggaacccttccccggaggatgacactgagggagtgcgccgattttgtgaaaaaagccctgaatctgtcccatgtaaccgtttacggggatatggagcagagtctggaacgtgcagccgtgtctaccggatccggaaagagtatggtggcaaaggctatctcgtcaggggctgaagttctggtgacaggggacattgactatcatacgggaattgatgcgccttccagagggatagccattattgatgcagggcattacggaacagaagctatgtttattgattttatgagacaggtacttgccaaagaatacccgcagctctctgtggagggaatgccggtaaaggagccgtttacctggatataaaatcattgattggatcatgcagagcagaattgggacggggaagtgtattccttcgtccttactttataaatggaggttgcttatggaacaggagaaaatttgtgtggaaattaacggggaaaagagggagtatccatggggaattacctttggagaaattgcacaggattatgagggtagcaccagatatcctattgtgctggttacagtgaatggaaaactaaaagaactccataaacgtctgaagagagagtgcaccatagaatttatcaccaccggagactccattggacataaaacatacaaaagaagcgcctctcttcttcttctgaaagcagtgtaccatgtggccggacacgaaaacgtagagaaggcagtccttcactttgcggtgggctccggattctattttacaattcagggaaaggtgaaagtggatgaagaatttctagggaaagtaaaagcctatatgatggaaatggtggagaagaagattcccattatgaagcggagtgtgggaactaacgatgccatagatctttttcacaagcatggtatgtatgataaggaaaagctgttccgctaccgtagggtctccagagtcaatatttacagtatcgatgaatttgaggactatttttatgggtttatggtcaatcatacaggttatctgaaatacttcgatctgtttctctacgatgagggattcgttctccagcttccggaagccaccaatccggagaaggtgccgccgtttcgtcccatgcctaagatctttcaggtgcagaaggaatctgaggaatggggagagcggatggatgtggctacggtgggagagctgaacgacatgattaccaccgtgggcgccagagaaatgatactcatcgctgaggcacttcaggaaggcaagatatccaagattgcggaagatatagcagggatgaagagtaagaagtttattatgatagccggcccgtcttcttccggtaaaactacattttcccacagactctccattcagctgtctgcgcatgggctaaagccccatcagatctcggtagataattattttgtcaatagggaagatacgcctgtggacagtgagggaaacaaaaactacgagtgtctggaggccttggatgtaaaacagttcaatgaagatatgtgcaatcttctggagggcaggtgtgtggagctgcccacctacaactttgttaccggccagagggagtacaggggggataccatgcagctgggccctgaggatgttttggtcatagaggggattcactgcctgaacgataaactcagcagttcccttccctcggacagcaaatataagatttatatcagtgccctgacccagctgaatattgatgaacacaaccggattcccaccacagacgggcggctaatcaggcgtattgtgagagatgccagaaccagaggtacttcagctaaaaataccatagccatgtggccatctgtgagaaggggagagagcgagaatatcttcccctaccaggaatccgcggatgttatgtttaactctgctcttatctacgagctggcgattctgaagctttacgcagagcctattctgtttggcatagagagggatgcaccggaatatgtggaggccaagaggctgctgaagtttctggactattttgtgggtgtgccaagtgaagatatccctcataattcaattctcagagaatttgtgggcggcggatgcttccgcctgtaggccagacacagtataaaaaactccgaaaaaacgccatgcaggtgtaggatggtacttgttgtgaaagtaatccattctgtgcctgcacggcgttttttttattctgccccctgttgctccggagagctgtcctcagactgaggttcatatttagcgaatatttttcggaacagcagggaattaacatatgcgatggcagcaaatccaaagaaaagccatataaaaagtccgtatgccagtgtttttcctgtgagaaaagtcaggaataccggagcgattgtgatcactgcgatcagtatggtgtaaggaagattcagaatactgaacagaagggcattcttgaggctgttcttcacatcgttgacaaacctggcaatatagggaaaaagatagagcatggtaatagtataaaaggtaccgataataagaatggctatctgcatgacttttcccataacccctgtaaaggctgccgtaatccggtaatcaagaccgagtatgatacccagaaccagcataatcagccatacaattgtactgatcttaaaattgctcttaaaggctttccaaaagccctttaccatgtaggactcttcatttcgagccattttgagggtgactgtgtaaagggctgtggctgaggccccgatggtgataaccgggacgcagcagattaaaaacagtatattcagaataaagatatcagctaatctggataaaaatctcataagagggctgtccagaccaaaaaaactacccatagtattatttctccttttcagatgtttcttccttggagggaagatagatatgcacaagttcaatccggtttttcaccacactgtccacagtgagacggatctgctgaggggtggtaacctcctcgccctttaccggaaaacgatccagctgttcaatgatatatccgccgatggaatcatagtcttcggattccagttcaatgtcaagttcttcattgagatcatccagctttgtggagcctagggaaaggtattcttctcccggcacaatctccgtaatctcttcttcttcctgatcatcgtactcgtcccggatatctcccacgatttcttccagaaggtcctccagtgtcaccaggccggctgtagctccgtattcatccagaacaatggcaaaattaatggaatcctcccgcatctccatcagaagctcagaagtatttttatattcataggtgaagtatgcctcccgcagaatcgaacggatggaaaagttttctctggagtccagcagaagcaagtccttcatattaacaattccaatgatgttatccgtagtctcttcgtagacaggaagtcttgtaaacttgtcctccctgaaaatttcaatcaactcatcgtaggtggattccacatccacaaaggttacatcaatgcggggtaccattacatcttttgcctgagagtcgccgaaatcaaatacattgtagatcatctggcgttcttcgctctcaatcactccctcttcatggctgacgttgagaatggtgcggagctcgctctcggtcatcgtactgtttttgccgttagggtctattcggaatagaagcagcagcccaagtgacagtttattcaccaggtagatcaccggggtaagcagtaccatcagtccgtagattaccttagcgtaggccagcgccagctgttctgagtagatagtagcgactgtcttaggtgtaatctcccccagaatcagtatcaacagtgttaagatacctgttgccagccctacggcagcattgccgaaaagcttaatcgttactgaagttgccagggcagaagcacttagatttacaatattatttcctattaaaactgcgctcagcatcttgccggaatcgttgaccgcttttaataaggtggcagccctcttgttgccgtcctcagccattgtctgaatacggatcttgttcactgtggtcattgcggtttctgctgatgagaaaaaagcagaaagtgctaataacagcagcagaaccattaactgtatggcatcactaggatccaatgaatgtcactcctttatctgtataaattatatataaagaaaaatatacagtatttcagtaataattgcaagtgagaactaaaagcagtgcttgtgtgagcggtctgctgcacggatggatttccataatatggttattcaaaaaatatgattttaggggtgtcgaaagaaagagaactatgatataatgtttgggaaaatgtagaaatgtatatgccctattttgggatatacttgaatataaacagtcatcaatttgagaagagcaaacataagaggtggaaaaatgaaaaaactaaacagaggtcaaaaaagacgttttcataatcttgtttcgaatattataggtttaagcattgtactgtccctcatagtatcaggactggcagggaatacccagacaatactggctgaggccggaactactgtttatctgaacggagcttccggagatgacacggcaggagggggtacggcggaaactgcggtgaagacgtggaaaaaagctaaatccctggcgggaagcagcgggacaatctatatcagcggtactgtaaccatctctggtactgcggaatggtcccttccctcaggagtcagcttaaaaagagctcctggttttaccaaacctctggttaatgtagggaaaggcagcaagcttactctggctgccaattattttggaaaagaagacgcgtccctgggggatgacggctgccttgcagtgaagggggaagaaaaggctgacagcacaccaaaaaaagaagaagctcaaaagaagaatgaatccaagaaagagccgttaaaagaggataaagaacaggaaaaacaggagaccgagaaaaaagagacggaagataagaagacagacgacaataaaaatacggatgacgataaaaatatagagaaagaagacggcggaaagagtaagcctgcaaaggatatctctcttccggattcctttactatggaaaagccggaggctctggcaaacttgtccctgaaaagctgcagcggagacggaactttttcctgggcagacagcagctttgtacctgatacatatgaaagcgcctgtgtagttatcttttctccaagtgataaagaaaagtatgactattctcagataaaaggttgggatgagaagaaaggcgtggtaaagcggacagtcactgtttacaccgcctctctgaaggatacagggaaggacacagagaaaacagaatccgacactggtaagactgagactgatgagaagacggaaaacagcggcggaacccagggcagtgaaccgggaacagacaaaacccctgatcaggaaacacaggacaaagacaaggctgagaatccgggaggcgtacctgaaaagaacgatacgcaaagtcaggataagcagccaggcacagacagttcaaagggacaggatactccccagggaagcgacagcccagataaggatcctgttcaggacaaggaaagcagcgatgagataggggctgataatgaagaaacactaaaaggggaagagacggaaaagacggtggcctcccataagggcagtgctttccatttggcagtggaatccctccccgtgagaatcacggaacagtcccaggtgggaagagtggttgccgcatcgaagctatatgaggaactctccccggcggataaggcaatgactgctgctgatgatctgaaaaagctgaaagacgcccaggaggcagcggggtatgtaaaccgtaccagcaacggggtaagtgtttcaggggatttccttccatggtatgtacagtttcaggtgaatctgaatcatgacgccccgtcactggcgattcccaccatagatactctgctatcctcttatgagatgaagctctgggaccttatgacggacactgaatatgagattcctcacggcaggaaagtgaccgtagtgatgaaagcaccggaggtatcggggtatgaaagttttaccattgtccattatctggaggatggcaccgtagagcttatcactccagtcattgccgacggactgatgacatttgagacgtcatccttcagtccctttgacgtaggaggcagcaaacctctggtggggctgccgagcggtgactcatccgacaagaaaacgaacagtacaggcagctccaacaataacagcagcctgaccgggaataatggcagcagtacggacagcagcaacaagacgggaaccaataagaaaaagaccccaactgcgaaagcagctgcagccaagacccagcagaccaaagcttccaatccgagtacaggagataccagtgttttgcttccttatattattggaggagcagcagcattacttatcataattattcttgttgttaccagaaaaaagaagaaaaaatagaaaaaagtgatagaacgggaaacccttccatatatttactatatgggagggtttgtttatggaacagacagctgcaaaaaaatcaataccaatgttactaatgaaatccctgctggcatcctatgtgcttaccgctctgctgctttttctgctggcatttctcctgtataaattcgatctgggagaaagtaaagtaaatcttgggattacagtgatctacatattatcctgctttcttggcggatttctcgtgggaaagggagcggggacccggaaattcctttggggtatggtgctgggtgcaatctatgcagccctgctggtgggagtcacctttttggtggaacaccgggtaagcgaaaacacatcgtctctgctctcttcactgtttctctgtgtggcgggagggaccctgggaggaatgctgtcgtaaggcgctcaacaagtaaaaaaatacttttaaaaaggggtgtcttgtgatataattagcacagtttacgatattaaggaggaaaagtaatgaaacatattaaaacattaaatacgaaaagtttacaaaatacagtgaaaaaaggtggatgtggagaatgtcagacatcctgtcagtcagcctgcaagacatcttgcaccgttggcaaccagagctgtgaacattccaaatagtcagctgtaatacggaacaatgaagcagcggttcaaaagccgctgcttgtttgtgttgtaatgcatgctgaggaggttcgctggacttttttagagagagaaaggggattcgttgtggtccatcgttatataaataatgactgccatatcgttttggatgttaacagtggttccgtccatattgtggacgaaattgtatacgatgcggttggtcttttggaagacaagctgtcttttgaggagacagcaaagatactaagcgaaaaatatgctttggaggaagtggaaacagcgctggcggagtgccgggagctgaaagaagagggaatgctttttactgaggatatctataaggatgctatctctcattttaaagagagggagacagtagtaaaagcactgtgcctgcatatagcacatgactgcaatcttgcctgccgctactgctttgccgaggaaggggaataccatggcagaagggctctgatgagttttgaagtgggaaaaaaagcactggattttctgattgctaattccggaaaccggaagaatctggaagtggatttctttggcggagagcccctgatgaattgggacgttgtgaagcagctggtagcctacggcagggaacaggagaagcttcataataaaaacttccgttttacgctgactaccaacggcgtgctgcttgacgacgagattatggaatttgccaataaggaaatgggcaatgtggttctgagcattgacggaaggaaagagatccacgattatatgcgccccttccggaagggaaagggaagctacgaactgattgttcccaagtttcaaaagtttgcggagagcagaaatcaggataaatattatgtgagagggacctttacccgccataatctggattttgctgaggatgtgcttcacctggctgatctgggttttaagcagatttctgtggagcctgtggttgctcctttcgaggaagagtatgccatacgtcctgaggatgtgccgatcatctgtgaacagtatgatatcctggcaaaagaaatgattaaaagagaaaaagaaggaagaggatttaatttcttccacttcatgatagaccttacagggggaccctgtgtatacaaacggctttccggatgcggttccggaaccgaatatctggcagttacgccctggggagatctctatccgtgccatcagtttgtgggggaagaagaataccttatgggcaacgtggacgagggtgtggtcagaaaggacattgtcaaagaatttaaagactgcaatgtgtattccaagcccaagtgccaggaatgctttgctagattttactgcagcggcggctgtgccgccaactcctatcatttccatgacacaatacatgatgtatatgaagtgggctgtgagcttcagagaaaacgtgtggaatgtgccattatgataaaagcagcgttggctgactaatcttaagaaagtaagaagggaagaaagatgaaaaaaaacaaaggaatagttgttttaattctgacagtgctgattaccggtttcctggtatttacagcagccgtgggaattgggcctaccggaacaggggcggcaaaacacattaagacaggtctcgatctggccggcggtgtcagcataacctatgagacgaaagcagagaacccaagcgcctccgatatgtctgatactatctataagcttcagaaacgtgtggagcagtacagtacagaggctcaggtgtaccaggagggaaataaccgaatcagtgtggaaatcccaggtgctacagatgccaatgccattcttacggaattaggcaagccgggatctctgcagtttatggatacagagggaaatgtagttcttgaaggcagcgatgtggcggacgcccagggtgtggtaggcgaagataataccacaaagaacaaacagtacgtggtaagcctgacgctgacaaaagagggcgccgcaaagtttgccgaggcaacagaggctaacttaaataaacagattgctattgtctacgacaatgaaacattgagtgcccctgtggtgcagagcgtaatttctgacgggaatgcacagataacaggtatgagcagtattgaagaagccaagaacctggcatctgcaatcagaattggttctctgaagctggagcttcaggaactgcgttctaatgtagtggcggctcagttgggtactcaggcgattaataccagtgtgaaggcagccggtattggtctggcgctggtgattttgtttatgattatcgtgtacctgattcccggactggtatccggtattgcacttatcatctatgtatgtctggatcttatctgtctgaatgcatttgatctgacactgacccttccgggtatcgcaggtattatcctgtccatcggtatggctgtggacgctaatgttattatctatgccagaatcaaagaggagattgcttccggaaaatctgtgagaacctcactacagtcaggatttaaaaaggcattttctgctatttttgatggcaatataactaccttaatcgctgcctttgtgctgaactggctgggatcaggaagcgtcaagggattcgctcagactctggcccttggtattgttttatctatgtttaccgcactggtggtatccagactgattatctatgcgttatatgcagtcggagtcagagacgctaagttctacggtaaaatcaaacccagagagccaattaattttctgggaaagaaaaagattttctttgccatatccattgtactagtgctgctggcacctgttatgatgggggtaaatcaggcttcctcagggaaggcattgaattacagcctggaattcgtgggaggtacttctacgaatgtaacttttaacgaagatttaagcatggatgagatagacagcaaggtagttcctcttgtggaagatatcaccggagacgctaatgtacagcctacaaaggtagtaaattccaaccaggtaatcatcaagacaagaactctgtcagtggatgaaagagaagcgctgaacaaagctatggtggataatttccaggtagatgagaccaagattactacagagagtatctcctccacgatcagcggagagatgagaaaagacgcggtcatcgcagtggtggtagctaccctgctgatgctggtgtatatctggttccgcttcaaagatatccgctttgccagcagcgccgtactggctctgatacatgacgtgctggtggtgctggcattctacgccattgccaaaatctctatcagcaatacctttatcgcatgtatgctgaccattgttgggtattccatcaatgctaccattgttatctttgaccgtatccgtgagaataagggtatgatgaagaaaaaggatgagcttgctacaattgttaatgcaagtatcacacagacgctgaccagaagtatttatacttctctgactacctttattatggtatttctgctgtttgtcatgggtgtatcttctatccgggaatttgcacttcctctgatggtgggcattctctgcggtgcatattcttctgtatgcattacaggtgcactgtggtatgtgatgaagacaaagattggaaaaaatagagcataatacaagcttcaggggatgtccgacgggcatcccctgtaatgttttacaggaggaaaaccatggaacgatggatgataacagcgaaaagtgcagactttaataggatcggggaggaattccggattgaccccgtgatcgccagactgatacgcaaccgggatattgttggggatgacgcaatccgggagtatctttacggcaccctgggggatcttccctcatggacacggatgaaaggcctcagggaggcagtttctctgatttatatgaaaattgaggagagaaaaaacatccgtattatcggagattatgatattgacggagtttgttctacctacatattgcttcaggggctccggcaggcaggagcgtctgtagatattgatattccagatcggataaaggatggatacggcctgaacgaagaactcattgccagagcttatgagcaggggattgacaccattattacctgtgacaacgggatcagcgcatcagaacagattgcctacggaaaagagctgggaatgactattgtggtgacagatcatcatgaggttccttttcaggagacggaaggaggggaaattaaggagatccttccccctgcggatgtggtagtaaatccaaaacagaaggagtgcagatatccctttaaaggcctctgcggagccggtgtggcatacaagcttgtatgcgggctgtttgagcatttgggggtttccaaagacgcactggaagaattactggaatttgtggccattgccacagtaggggatgtgatggacctgcagggggaaaacagaattctggtaaaggaaggactgaagcgcatacaaaacaccaggaatactggcctcagggaacttattcgggccaatcagctggaggacaggaagattacctcctaccatatcggttttattctggggccatgtatgaatgcaagcggacgtcttagcacagccaagagagccttgtctcttctggaatgccgggatccgtcagaggccgcagtgctggcccaggatctcaagagcctcaatgacagcagaaaggatatgacggcaaaggccacagaggaagccgtgcagatggtagagaacacgtctttgggccgggacaaagtgctggtgatctacctgccggagtgccatgagagtctggcgggaattgtggcaggaagaatccgtgaaaggtatggaaagcctgcgtttgtacttaccagagcggaggaaggggtcaagggatccggcagatctattgaggcatttcatatgtttcatgagctggtgaaatgccgggaatacctgacaaaattcggagggcaccccatggccgcagggctgtccctggaagaaaagaatattgaaccattcagggaaaagataaacagcggctgcagccttacggaggaggactttgtcactaaagtgctcattgatgtccccatgcccctgaattatataaacaaaaacctcatcagccagctgagtctcttagagccatttggaaagggaaaccaaaaacccttgtttgcccagaaaaaattgagacttatgggagcgagagtttttgggaagaataaaaatgtagtaaaaatgaaggcggtagatgagacgggttatcccatggaggctgtttactttggggacggagaagcatttgtgcaggagatccgtcaaaaagaggagtggagtgtggcatattatccggagctgaacagttatatgggaagagagactttacaaatcgtagttcagaatttacaatagaatttgattctgcaaaaaaaagatgctataatgtctgtaaaatgcagtttttgtgtcgtaatatggagagatagaaagaaaaactgcataagacgcagttaaggagataattgaaatgaagaaagtggaagattacgtaagaagtatcccggatttcccggaggaaggtattatctttagggatataacaagtgtactgcaggatgcggacgggctgcagctggcagtggattctatgcagaatcttgtaaaggatttggatatagatgtggttgtgggcacagagtccagaggatttatatttggtgttcctattgcatacaatcttcataagccttttgtgccggtgcgcaaaaagggaaagctgccctgcgagacgctggcaatggagtatgatttggaatacggcagcgcagagattgaaattcatacagatgccattaaacccggacagaaggttgtggttgtagacgatctcattgcaaccggaggtaccattgaagctgccgtaaagcttgtggaggaactgggaggagaagtggtaaagattatcttcctcatggagctggcaggcttaaagggcagggagagactgaagggttacgatgtagcgtctgtcatctgttatgacggaaaataaattggtaggtgagcaaacgaatggaaaatgaacacacagtagatcgggaagaaaagttatataaaatcaaaaaggcagacgaaagcgtcaaggccatggaagattttaccagcccctcagtattatatgaagagcttatttccagtgtcagaaaataccatccgtccaccgatattaccatgatagagaaagcctatcaaatcgccagagatgctcatgaggggcaagcgcggaagtctggagaaccctatatcatccatcccctgtgcgtggcaattatactggctgacctggagctggataaggaaaccatcgttgccggccttctgcacgatgtcgtggaagataccgtaatgaccacggatgaaatcatccgggagtttggcgaagaggtagcgcttctggtggatggagttacaaaactgggacagctgtcctactcagccgacaaagtggaggtacaggcagagaatctgagaaagatgtttctggctatggccaaggatatccgggttatactcatcaaactggctgaccgtcttcacaatatgcgtaccctgaagtatatgccggagcataagcagaaggataaggcgagagagacgatggacatctatgctcccattgcccagcgtcttggtatctctaagattaaagtggaactggatgacctggcgctgaaatatctcaagccggaagtctactatgaccttgtagagaagatctctttaaaaaagagtcagagagaagagttcgtgggcagtattgtgggcgaggtccggaagcatattgaagcagctaatatacatgcgcagatagacggaagagtaaaacactttttcagcatctataaaaagatggtgaatcaggataagaccctggatcagatttatgatctctttgcggtgcgtatcatagtggatacggtcaaagactgctatgcggctttgggaattatacatgagatgtataagccgattccgggaagatttaaagattatatcgccatgccgaagcctaatatgtaccagtcattacatacgacgctgataggacctacaggacagccctttgagattcagattcgtacttttgagatgcaccggacggcagagtatggcatcgccgctcactggaagtataaagaagcttctgacggcaaaaaaagcgtgagccagcaggaagaagagaagctgagctggctgcggcagattctggaatggcagcgggatatgtcggataaccgggaatttatgagccttctgaaaagtgatttagacttatttgcagagaatgtatattgttttacccctgcaggagatgtaaaaaccttgcctaacggttccacgccaattgactttgcgtacagcattcacagtgcggtgggcaataagatggtgggagccagagtgaacggaaagctggtccctatagaatacgttattaaaaacggggacagaattgaagtaatcacctcacagaattccaagggacccagcagggactggctgaaggtagtgaaaagtacccaggcaaaaaacaagattaaccaatggtttaaacaagaattaaaggaagacaatatttccaagggcaaggatatgctgagccaatatgccaaagccaagggtgtggctctgggcagccttacgaaaaataaatacatggaatctgtgatgcgcaaatacggcttccgtgattgggattctgtactggcagcccttgggcatgggggactgaaagagggccaggtgctgaataagctcatggaaagctatgagaaagagcataaaaaagagctgacagacgaacaggtgctggaagcggcggcggaggccaaagaaaagcttccggtgggcaagtccaaaaatggaattgtggtgaaagggattcacgatgtggcagtacgcttttccaaatgctgcagcccaataccgggagatgaaattgttggctttgtcacccgtgggcggggggtatctatccaccgcacggactgtgtgaatgtgctgcatatgtcagaggctgacagggcgcgtctcatcgacgcggaatggcaggtgccggacgtggcccatagtgagctgtacacagctgagattaatgtgtacgctaccaacaggacaggactcctggtagatatctcacgaatctttacggagcggagaattgacttaagcgcagtgaataccaggacgacaaagcaggggacggctacgatcagtatgtcttttgatatcaggagcaaggaagaactgcacagtttagttgaaaaaatcaggcaggtggacagtgtcattgacattgagcgtaccaccggttaggagttgctatgggaatgttagagcttaggtatcttcctgtgggtatgggagcgaccaattgttatttagttatgaataaagataccagggagctggtgattatagatccgggggatgacccggcaaagattaaacaggctgtatcaaaaatagagggaaagccggtggctgttcttctgacacatggtcactacgatcacatgatggcctcaaatcaggtaaaaaaagaatatcatattcctatctatgcgccgagggcagaacgggaggttctggcagattccgccaagaatctgtctggaggctggatgatgaagccctaccatgtacagacagattactgggctgaggatggtgaggttctgcatctggcaggatttgagattcgtatgattcttactcccgggcacacggaagggtcctgctgttattacatggaagaggaacatgtggttttctgcggggatactatctttctggaatcctgtgggagaacagacctgcctacgggggatatgtcgcagataagaaaaagtattcacataatcctggacacggttccggatgatacggaactgtatccgggtcacggagaagctaccacagcagcccatgaaaaggcttttaatccctttgtgtaggccgggggacagaagatgacaggaatcgaatttaatgagagagattttgaatatgatgtatatacgctggtgaaagccttttatccccgggaagagcttcggatattctacgaaggggaggcagagaaggaagcagagaagaagctgtgccagaccttgcttcaggtattgtaccaggaaggaaaggcatcattattcgtctatcaggcagggcaatgctccgtttcggatgccattgccctggattgtgtagacaggaaaacagccaagaacaggctgaaacagatggtgtacagaaacctggcaaagctcacaggcagagagctgccctgggggaaccttaccgggatacgcccgaccaagatcgccatggggctgattgagtcaggcatgtccaatgcagaggccgctgattatatgcgcaaaaactattataccagcaatgaaaagacagcgctggcgattaccattgccaacagagaaagggtgctgcttgagcctgtggattatgaaaacggctatagtttgtatatcggaatcccgttctgcccttccatctgcctgtattgttccttcagctcttatcctctggaacggtggaaggacagagtagacgaatatctggatgccctcttaaaagagctggattttatcagcgagaccatgaagaaccgaaggctggacacgatttatatagggggaggaacccccactaccctcacccccaggcagacagagcgtctcctcacccatgtggagcacagatttcccctggagcaggtaaaagaattcacaatagaagccggcagacctgacagtattacccgggagaaactggagacagtgcgcagatatccggttaccaggatctcagtgaatccccagaccatgaatcagagaactctggacctcattgggagaaaacattctgtggaggatatccgggaggcatttgccctggccagggaaaccggatttgacaatattaacatggaccttatcgtgggcctgcccggggagacaaaggatgacgtaacctgtacgttagaggaagtgaagaaactttccccggacagtttaaccgtgcactcactggcagtgaaaagagcagcccggctgaatatgtttaaagaacagtatcaggagatgacctttgagaataaccaggagattatggatatggtgcaggactgtgccagaagtatggggatgggtccctattatctgtaccggcagaagaatatgacaggcaatcttgaaaatgttgggtatgcaagggttgacaaagcaggaatatacaatatactgattatggaagaaaagcagaccattattgctgccggagcgggtgcatccacaaaactggtatttgacagcggcaggcgcattgagcgggtggaaaatgtgaaagatgtaacccattatattaccagaatagacgagatgattgagagaaaacgtgtgggaattgccacttatctgcaggaaggagaattcagatgacggatttccggcgggatcaggaaccccatcatttgattagctttgatctggaagaagagatcgaacacggcatccgggtgagcaatctggcttatcagacagctcaggggcttggactggaggaggagaagtcatatgagctggcagttgcgggagttctccatgacatcggcaagctaaagctggcaggttacatcgcaggcattgaaaaccctctggttgtggaagaactaaaatatgtgcggcttcattctactctgagccatgagatactgaaggagagaaactattctccttttattttgagaagtgtgtattatcatcacgagaattttgacggatccggatatccggagcatctggcaggggagactataccttttggggcaaggattctgagagtgtgcgatgtctttgcggcattgactacggatcgcccgtaccgtaaaaagtttgataaatatacagctctggaaatgatgattgatgaagtaaagaattatgacatgctgatttttctgacctttcagaagattgtgcatgaagaattttaaacatgaaagagaggagaacaactatggcattaaaaaagaaaccggtaaccgggatgaaggatatcctgccaaaagaaatggagatccgcgattacgtgatccgcatgattaaagatacgtataagagcttcgggtttctgtcccttgagaccccttgtgtagaacatatagagaatctttccagcaaacagggaggagaaaacgaaaaattaatctttaaaatcctgaaaagaggggaaaagctcaagctggagacagcagcctgtgaggcagatcttgtggacgggggacttcgctacgatcttacggtacccctctccaggttttatgccaacaatgccaatgaactgccctctccttttaaagccctgcagatgggaaatgtgtggagggctgaccgtccccagagagggcgcttccgccagtttatgcagtgcgatatagacatactgggggaaccaacagttttggcggagattgagctgattcttgccacttctactcttattggaaagctggattttgagaactttacaatccgcatcaacgatcggaagattttgaaagcaatggctgcctacagcgggttctctgaagaaagctatgacacagtttttattattctggataagatggacaagataggcgctgagggtgtggcccaggagctggaaaaagaaggattcccggtggaaggaatccataaatatctggatctctttcaggagatcaccagtgatattcagggtgtccggtactgtaaagaaaagctggaaggatatctggatgcatcaactgcggaagatatggaaacaattattaccagcgttgatgctgctaagacagctgattttcaaatccagttcgatcctacgctggtgcggggcatgtcttattacacaggccctatttttgagatctctatcgatgggttcggcggctcagtaggcgggggcggacgctatgatgagatgattggaaaatttactggaaatcagacatgtgcctgcggattttctattggttttgagcgtattgttatgctgcttctggagagggaataccaggttccccagggagaggggaaaaaagcgtatctgattgaaaagggaatgcctgcggaaggtatgataaagcttcttgctcaggcagcgaaggagcgccaggcaggcatacaggtatctatttccatgatgaagaaaaataagaaattccagaaagaacagctgatgcaggaaggctatcaggagattgaagagttctttaaggacagagtatagaggagaagaggattatggcagaatcaatgaagggattaaagagaacccacagatgtacggaagtctctacagcaaatattggtgagacagtgacccttatgggatgggttcagaaaaacaggaataagggaggcattatctttctggatctcagggatcgttccgggattgtacaggtgatttttgaggagggaagcattgatgcagcagggtttgaaaaggcagggagactcagaagtgagtttgtagttgctgtagtgggaaaagtagaggctcgttccggagcggtaaatgaaaagatggcgacaggagagattgagattcgtgccaaacagctccgtgtcctctctgaagctgagactcctccgttcccggtggaagaggagagcaaaacaaaggaagaactgcgtctgaaataccgttatctggatctgcgccgtccggatctccagaggaatcttatgatgcgcagccgtgtggctatgcttacccgccgctttctggaagaggaggggttcctggagatagaaacaccggttctcgggaagagcaccccggaaggcgccagagactatctggttcccagccgtgttcacccgggcagcttttatggacttccacagtcccctcagctctacaagcagcttctcatgtgctctggctatgaccgctattttcagattgcaaaatgcttccgggacgaggacctgcgtgcagaccgtcagcctgagtttacccagatcgatatggagctgtcttttgttgatgtggacgatgtaatcgatgtaaatgaaagaatgctggcgtatctattcaaagaggtactgggtgtggaagttccccttcccatacagcggatgacctggcaggaagctatggaccggttcggatccgacaaaccggatatccggttcggcatggagcttacggatgtctcagaaactgtaaagggctgtgaattcgccgtgtttaagaatgcactggaggccggaggcagcgtgcggggaatcaatgctccagggcagggaggcatgcccagaaagaagatagacaagctggtggattacgcaaaagattacggtgcaaagggactggcttatattgcccttcaggaggatgggagcgtaaagtcttcttttgctaaatttatgaaggaagaggagatgtcggggctaatcgccgctctaaacggtaagcccggagatctgcttctctttgccgccgataaaaacagggtagtttgggacgtccttggggctcttcggctggaactggcccggcagatggagctgctggacaaggaggaataccgctttgtgtggattacagaattcccgctgctggaatggtcagaggaacagaaccgctttactgccatgcaccatccctttaccatgcccatggaagaggatctgcccatgataaagactaatccgggggctgtaagggcaaaggcatacgatattgtgttaaatggaacagagctggggggcggaagcgtcagaatcttccagaatgacgttcaggaaatgatgtttgaggctcttggattcacaagggaagaggcttacgagcgttttggctttcttctggatgccttcaaatatggggtgcctcctcatgcgggccttgcctacggactcgaccgtatggtgatgctgatggctaaagaagacagtatacgggacgttatcgcatttcctaaagtaaaagatgcttcctgccttatgacccaggcacctggtgaggtggacgagatacagctgaaggagctgggacttaagatagacaagacagtaggacagacagaacaataaacaggaggtcaacgatgaggaatacacagttaggacgggtttggattgcaggggctgacggaagggtggcgagagaatttgtaaaactcttagatgccagggaagcagagctttttcttacagaccgggaagacagggacgtttcagatgccgatggagtaaacatgtttgcagaaatgaatcggccggatgtcatcattaactgtgcaggaatcacagatgtacagctctgcgaaaaagagccggaacttgcctaccgcgtgaatgcgctgggagccaggaacctggcagtggcggcaagaagggtaaatgcccgcattgtccagctgtccacagacgatgtttttgacggaaagacagatacctattacagtgaattcgatcagccggccccttttaccgtgtacggcaaatccaagctggcaggagagaactttgtgaaggatctggcgcccaagcatttgataatccgcagctcctgggtatacggtgagggaaaaaattttgtaaatgacctgctggaagcggcaaaggaagagaaagagataccggttcctgaggagcaggtggcggcccccaccagtgctctggaggtggctaagtgtatcctgcgtcttctgacagaggaagcatacggaacctatcacgctgtctgcagcggctcctgcagcagatatgaatttgctgcgaagattatgcagcttgcaggtcttgatgccaggattattcctgctttctccagagatttacctgatatatccatgcgccctgcccgctcggtgctctataatatgatgctgcgcatcagcggtatggagactcctgtgagttggcaggaagcgctggaaacctatatctgcagcttgaaaaactagtttatcaggaaaatgaggagattgtatatgaatgcaaagaaagagagaaagaaaccggggctgactacggtaatatttatcgctttgattctgggagctgctgccggtattctgatccattattttttcccggaagggtatgtcagagataacatcattgtgggcggtatctttgaagtgattggaaccgggttcatccgggggatgcagatgctggtagtaccgctggttctctgctctctgatctgcggcagtatggccattggagatacaaagaagctgggaaaagtcggtgtaaagaccatggccttctatctggctaccacagcgttggcgatctctattgctcttggaatcgcgaacctgattaatcctggtgtgggattggatatcacatcggttcaggcacaggagacgcaggtggcagaggcatccagtctgacagatacactgctgaatattatacccaagaaccccattcagtctcttgcagagggaaatatgctgcagataatattttttgcgctgattgtgggcattcttctggcaaagcggggagaaaaagcggaagggctggcaaatttgttcagccaggggaatgacttgatgatggatatgaccatggcagtgatgaaagtggctcccgtgggcgtgttctgtctgattgcaaagacatttgccaatataggatttgatgcctttgtgcctatgctgaaatatatggccgcagtgctggtggcactggccctgcagtgctttggggtctatcaaatctttttgaagctatttactggtctgaatcctatcaagtttgtgaaaaaatttctgcctgtaatgggattcgctttttcaacagcaacctcaaatgccaccattcccttgtcgattgatacccttgccaaaaagatgggggtatccaggcgtatttcctcttttacggttccccttggggcaactatcaatatggatggaaccgctattatgcagggagttgccgtggtgtttgtagcacaggctttccatatcagtctgactcccgtggattacctgacggtgattgccacagcaaccctggcaagcgtaggaactgccggagtgccgtctgtaggattggtcactctgtcaatggtctttacttccgtgggtcttccggtagaaggaatcggacttataatgggaatcgaccgtatcctggatatgaccagaacggccgtaaacatcacaggggacgctgtatgcacaaccatcgttgccagtcaggacaaagccctggacagagacgtattcaatgcagcgggttaatggaggaagacagatatggaactgacagttactgcttttctgatagtgtgtccccttatatttctggccagttttgtagatgcagtagcaggcggaggaggcctaatctccctgcctgcttattttctggctggtgttcctatccacaatgccatagctacgaacaaattatcctctgccgcaggcacatgcatctccacctggagattctgtaaaaataaatacgcggatctccccctggccatcccttctgttctggtggctctggcaggctccgctcttggagccaacattgcgctcataaccagcgacaaaatcctgaaaattacacttctggcagttctgcctgtggcagctttctacgtgttccgcagcaaagacatggaaagaaaatcctccgtggcaatctcagggagggcaaaatatgcaattgtaattacagcgtcctttgtgatcggcgcctatgacggcttctacggtccgggaaccggcaccttcctgatactcatctataccggaatggcccgcatggacattaaaacagctgccggcaacaccaaactggtaaaccttgcctccaacatggccgccttggcaaccttcctcctccacggcaagatcatcttccccctgggcttagccgcctccgtcttcagcatagccggccactatctgggttccggaatggtcatgaaaaccggcaccaaaatcgtaagacccatcatcctggcagtactggcactcttattcataaaaataatcacgggaatatgaaatagaaaaaatttacacttgcagaaacaaataatcaaaccataaaaaatactacatactaaatatactaccaatatacacagtatgtgaattgaatatactgccagggaaacagatgccgttcctacgcagggtcaggcgggagatagtacagctcatatgcgcagactacgtagcgcgtcctaagatccactgccaccgaacacttagaatcgacggctctccggagattcttagtgagcggtaggcagttagcttaggagaagcgcagtagcaagcatatgagctgtactatctcccgcctgaccctgcgtaggaacggcatctgtttcccgtccgtcctgataagacagatcatttcacatcactggaaatctccttcactgcctctcccatccccccaagaatagcctgcgccacatcttcgttcatctgcagcttccagctagtcccgtcattgataagagtaagatccagctttgtggaggaagcgcttttattggcctttatagaattcagaagcagctgactggatttcttcagccggccgctttcaccgtctgcaaaggcctgagaggagttcagataggagtccagttttttctcgtaggaattcaaaatactcttggcatcgtagctggtaatctctgcggttaccgtagcagtatgaccgtcatcggactcttttaagatacgatagtcaaaatgatcgctgatctgatttgtcagttcctgagtgagagaacggctataggcgtcgtctgcatcaaacaaggtgtctatccccagataacggttcagctgttcggtgtcaaattccttcagagtatcaaaatgaatctccacaatctcttccggggcaaataggttaggatcttttagataagacacgaaacctcctaccagctggtcgtccaggcggctgctgtgctccagcttccaggtattactttccttagataatttcagagtacagttattctccacagtgtcgtattggttctcatctagcagctctcccagaagaagataataatcttccagggaatactcgactccttccgggttggcagaactggcgatgcgttttttcatggaagcccgggaatagtcctttgccagtgtttcggcgtcaatggtgttgagacgaaccgttaccctggcggtttcgtttttcacctgaatgtccaggatcttataggaaaagttctcataaaacctggagaatatatttttgatttttgaggaaacttcctgatggatttcccctgaggggtaaagatcttcgtaggaaatatacttctcaatggtcttatcatccaaatcctttaacaaatccagctctctggtagcagcagcctttacctgacttttttctgacttttgacaccccccaaaaagacagacaagaatcaggagcaacagtgtaaaaagcaatagttttctgctgtatttcatgcattttctccaatttactgttttatttttattcatatagtttatcagataagggaaaaaagtcaactaagcaattacaaggcgtgaaccgtatgcgtaaaagaaaggctgggggcacataagcagcagtattctggaaaccctaacaatacggcatgcagaattaaagaatatttaagaaaattacatagagaagttaataagactttgctatactgtataaaatatttttgtttatcctaaatacacagtgaaaattaaatataaggaagatggaggatgatgtatgaaaaagaaaatcctaattgcggtgtctgcagttgctgccgtatgtgtgatagcaggggctttctggctgcttcggggaagggacaaggggaagaatacggacgagctggtgtatgtggagaaggtttccgaactgatgggactgggcagcggtatggggaatccgggaaggttctccggtgtggtagaatcccaggaaacctgggagatacagcaaaagcaggacaaaaccattaaggagatattagtggaagtaggggaagatgtagatgtgggaaccccccttctgacttacgatacagcaaccatggagaccgacttgaagcaggcggagctggagctggaacgctttgacaatgatatcacaaatctgaacaaccagattaagcagctggaaaaagagaaaaaagaagccagtgatgacgaaaaattatcttatacaacccagattcagactgctcagacggatataaagaaaacagaatatgagaaaaaaagcaaatctgttgagattgagcagatgaaggaacagattgcgaatgcgacgattaccagtgagattaaaggtgtagtaaaatccatcaacaatggagaaagccaggatatgacaggaggggaaagccaggcgcttatgaccatccttgccactggagatttcaggatcaaggggaaagtaaacgaacaaaatctctcggccgtgacagaaggggaaccggctattgtccgctcccgtgtggatgacaagcggatatggaacggaacctttgggaagattgatgtggataatcctgccgccagcaacaattccggaatgtatggcatggggatgtcttcggagggaggttcggatcagtcagcctccacttcctattacttttatgtggaattagagtcctcggacggacttcttctggggcagcatgtatatatagaacagaacgccggacaggaagaacaaaaagaaggggtatggctggatgcttcctttatagcggatcttgacagcaaaccatacgtatgggcagataacggcaaagaaaagctggaaaagagaagtgtagtattgggtgagttcgatgaagcgctgaatcagtatgaaatcaaagacggactgtccagggaggatgcggtggcgttccccctggaaaccctaaaggagggggcacctacaacggacagccctaccgctttgatgaatgagggggatatgtcagcacctgcagagggggacatgcctgtggacgaggcgatgccttcagacgaggggatgtcttcggaggaacccataccttctgacgatatgatcgaaagcccggaaggagaggaaggtgcggttgcccaatgatacttgagctaaaagatatctgtaaagattatatgcagggcaaaatgacaatccctgtacttaaaaatgtaaacttcaccatgaaagagggggagtatacggccattatggggccttccggttccgggaaaaccactttaatgaatattatcggatgcctggataaggctaccagcggagccttcttcctggatggagtagatattaacagctgttcagacaacgccatgtcagatattcgtctaaacaagatcgggtttgtttttcagagctttcagctgctgcccaggcagagtgctttagagaatgtggaacttcctctgagttatgcaggtgtggggcgcagagaaagacaggaaaaggcgattgctgcgctgacccgcgttgggctggaggacagggtagactttaagcctacgcagctttccggcgggcagaaacagagggttgccattgcccgggctatggtcaataatccaaagatactgttggcagatgagcctaccggtgcgctggactccagatccggggaacaggtaatggaacttttcggacgcctgaaccaagaaggggtcaccatcttaatgattacccatgatgcggggatagcgtcttatgctcagcgggttgtaaccatcaaagacggtatcctggcggaagaggagggcagagaatgaaaaagagactgggattagtgatagggggaatcgcaggagtctgcgtggcagccgtgggtatctggtacggctacggcaaaatgagtaaatcaacggtaaaggtatacaatgtcagtgatctggcccagggctactggggagatcccatgagcttaaacggaatgatctcctccgatgtttcccaggatgtacatctgaccgacaagcagatcgtagaagaggtttatgtgagtgagggagaccaggtagatgtgggtgaccctttgctctcctatgatatgacccttgtaaatatagaattggaagttgaaaaactgaataaagaagggatggagatccagaagaaaggaacagaacaggaaattgagaagctgaagaagcaaaagcctgtgccggaatcctcaaaagtttcttctccggggaaagacgagacagcaggtacagcccaaaccacatccttcacaggggtgagcggcggatttacccgtctctttggcagctcggcaatggagccaaagacaggtgcaccgggagaagaagacatggatgaaaaagatcccgaggcaggaaatccggatccgggaactttggacccaggtcaggaccccgacaaggaggaaccgcccaaagaagaggtcaaggcagaggctttggagcgcattgatgagaattccaagccctacaaaggaagtgggacaaaagaggacccctttgtctatctgtgtaaagaaaatcccatactaatgggttcccttttgaatatgctggggggctttggggaaggggataccaagacacttcccgaaaagtatgcccagctggaaatacgggaaggagatacggtggacggactgcttttgacggccctctacctggacggaagaaagattgtggaaaaatgtatcccggaggaagaatatcagatccgtctcagtgccgtaaagggagaagagccggaagaaaatccggagggagatgaattttttgatatcggcgatgagattccacaggatgatattattgcaggctataccaaggcagagctggaaaaagcgatccaggagaaacagaaggatctgaaaaagctggagctggatatcaaagaaagtgacctgaaaatacagaagatcagcggcaaactggagaatcagaccattaaaagtacgattaaaggcacggtgaaagcagtaggcgatcccgagaaaggtgaaacagacggcaaaccatttattcaggtggtaagcagtgaaggtctatatgtgcggggaagcatcagtgagcttcttttggataatgtaaagccgggacagatgctgacgggaagttctatggagacgggaactccttttgaggctgagataaaggaaatttccccatatccggccagcagcaatttctttgggggcggcggcaacagcaatgtatcttattatccttttactgcctatatcgcccaggcagagggattaaaaaaccaggaatatgtcagtcttcaggctgatatagacaccggtgcgggtgcggatgccctgtatcttcaaaagccctttgtgaggacggaggacgggaaaagctacgtatactgttctgtaaaaggaaggctgaaaaaacaggaagtgatcacaggcaagacactgtggggctctcttatagagataaaaagcggactcacaagagaggataagttggcctttccctatggaaaaggggtaaaggagaatgccagaacaaaggatgcgtctattgatgaactttattattagaaggaggtaagttatgctggaaaacataagattgtcctttcagggcatctggtcacataaaatgcgctccttcctgacaatgctgggcattatcataggaattgcatctattatttctattgtttctactattaagggaacaaacgagcagatcaaacagaacctgattggttcaggcaacaacacagtagatgtaacgctgaatcagggagattatccctatgaaatgggctataatgatatcccttcaggagttcccgtgatcactcctgaggtgaaagaggaaatcctgaatttggatgaggtggaaaaggcttccctgtatcagagcaggacctatgcggatgggatttattatcagaacaatggtctggaaggggggaaggttctggggattgacaaagattacctggatacctgcgggtaccaaatcgttcagggcagagggttaacagaaaaggactaccgtcaatttgccaaagtagtgctattggatgaggactccaaaaacagtctgtttcaggatgaacagcccctgggaaagacagttgagatacagggtgagccttttaccgtggttggtgtggtaaagagaaccaatgcctttgagccggtgattaattctatggaggattactacaattataaccaggagagcagcggcgtgctgatgatgcctgatgccgcctggcctgtagtataccgttatgatgaaccccagaacgtaattgtgaaggcccctgacacagaaactatgagcagtgcaggcagaaaaacagccgatctgctcaatgggtatctgtttgacagcaccggagagattaagtataaagcggcagatctattggaaaaagccaaaaatctccaggaagtaagcgccaatacaaaccggcagcttctgtggatagccagtatttctcttttggtaggggggatcggcgttatgaatatcatgctggtatctgtgacagaacgtaccagcgagattggtctgaaaaaagcgataggcgcacggaagaataagattcttgcacagtttttgacagaggccgcggtacttaccagtatcggggggcttctgggaatcattgcaggtattgttctggcccaggctatctccaagatgtctcagacgccggttgccatcagtcctccggctatcgtgggctctgtaatcttttctatggttatcggaattgttttcggacttctaccttctgtgaaagctgcaaatctgaatcctattgatgcactgcgcagagaataggaaaaacctctgtcccgggaaattttcccgagggcagaggtttctgcgtttaaaagccgtaatcttctccgatgagaactactttaattctgccgggtaccatggaacgtctggtaattacaagatcagaacagatacatccgtcagacaggcagtcctggcaggttcctgttacggaacagggcgtctttacaccaacccggaggctgttgggcggtgcggctgcatttcggactctatgtactccgtcttctatggtttttaccaccttattcataccggccgctatcactacatgccggggaccgtgacagagacaggcaacccggttgccggcaccgtctatgttgataagctcaccgtctatagtgatggcgttgctgctcatcaaaaagtaatcagccattacaattttgccgtaaagtgcccgtttctcttccggagtctttgcggacattcggtcaatgagttcatagccgcacccctggagtcctttcagaattcctgcctctactaaagtttctgatccgccccaggttaccgaggaagtttccgggattaattcccggattttttctacggcggactctgcagtcggacagtagaatccctccatgtttcgcttttttagattttttatcaatgtttctgccgtattggcgtaggactgagatttgtatgacatataaaatgacctcctttcttcagatagtatcattgtaccatattttttgataaacaatggaagttttagaaaatgatttgtcatatttgtttggttatgctaaaatgaaatgtaacggctaaaactcggttcgtttttgatcagtacattgaacacgagaatataaaaggagtggtacaaggccatatgaaaaaaacagcaatcgtaacagatagtaatagcggcattacccagtcccaggctggggatttgggaatctatgtaatcccaatgcccttttatatcgacgaacagctttttctggaggatataacactgacacagaaggagttctatcagaggctggaggatgatgctgagatctttacgtcgcagccatctcctgcggacgttatggagctttgggagaaaattttagaggagtatgaagcaattgtccatatccctatgtcaagtgggttaagtaattcatgccagacagcgcaggcactggctaaggagtataacggcaaggtacaggttgtgaataatcagagaatatcagtgactcagagacagtccgttctggatgccattacactggcagctgcaggcaggtctgcgtcagagattcgggaaatcctggagaaggagaaggccgagtcaagtatctatattacggtagaatctttgaaatacctgaaaaaaggaggcagaattacccctgccgccgcggccataggaacggttctgaacctgaagcctgtcctgcagattcagggagaaaagctggatgccctgtctaaggcaagaggcaaaaagcaggcgaaaagaaccatggttcaggcaatgaaaaaggattttgaggggagatttgcagggtatgtgcagtccggtctgatgtgcctggaggctgcctatacaggaaatcaggaggaagccctggaatggaagaaggaactggaagctgctttccccggaatgccgattcatatggatcccctttccttaagtgttgcctgccatattggatatggagcgctggcagtagcctgtgcaaaaaaagttgagatagaattgtagtggaggagttatgaaaaagatactggaactaatagaagaggaattgagacaagcgttcaaggcagcagattatgacgagacgtatgccagggtgaccatctctaaccgtccggatctgtgtgaatatcagtgcaacggtgcgatggctgctgcaaaacaatataaaaaggctccgattatgatcgccggcgatgtggtacagcagatcggggaaagccaggtgcttaaggaggcagaagcggtgcctcccggttttattaacctgaaaatcagcggggaatttctgtcagagtatctcaatgagatgcaaagagacaatcatctctctgtggaacagacagaaaatcccaagacggtgatgatcgactacggcggtcccaatgttgcaaagccgctgcacgtgggccatcttcgctctgcaattatcggtgagagtctgaaacgcatggggcgttttctgggtcacaaaatgattggggatgtacatctgggtgactggggtcttcagatgggactgattatcacggaattgaaaaagagaaaaccagagctggtgtatttccagcctgattatacaggggaataccccacagaacctccatttaccatcgctgaactggaagagatttacccggctgccagtgcatattccaaagaacatccggaatacaaagaagaggctatggaggcgacgcatcagctgcagaatgggaatcctggatataaggctctgtggaaccatattctgaatgtctcagtcagtgatttgaagaaaaactatgaaaagctgaatgtaacctttgatctgtggaaaaaagaatccgatgcccagccctatataccggagatggttgcatatatgaaggaaaaaggatatgcacatctggatcaaggggcacttgtggtagatgtaaaagaagagtctgacaccaaagagatccctccctgtatgattctgaagtcagacggggcctctctgtataatactacagatctggcaaccattgtagagcggatgaagctgttttgtccggatgagatcatttacgttgtggataaacgccaggaactgtattttacacaggttttccggtgtgcgagaaagacaaagctggtaaaagaagaaaccggattaagctttcttggattcggaactatgaatggaagagacgggaagccttttaaaacaagagaaggcggagtgatgcggctggagaccttgatccgggaaatcaatgatgaaatgtataaaaaaattgtggacaaccggagcgtaaaagaagaggatgccagggggacggccaagattgtgggcctgtctgcgattaagtatggcgacttatcgaaccaggcatccaaagactatatctttgatgtggagcgttttacctcctttgaagggaatacaggtccgtatattttatatacaattgtgcggattaagtctattctcggcaggtatcaggaagagggaggcgattggaagcagggctgcatcaaagcgcctgcaaatgactgtgaaaaagatttgatgcttacgatttccaggtttaacagtgtggtggagaacgcttacgaggaaaaagctcctcataagatatgttcctttgtctacgatctggccaatgcgtttaaccgtttttatcatgagacaaagattctgggggaagaagattccgggaaaaaggcctcttggataagacttttagtacttaccagagatgtgcttgagactggtatagagcttctgggcttttcggctcccgagagaatgtaggacaggaaagaacacagggcggacaggactgctgaaacagcggttttgtctgcctttttttgcgaaaaacacatagtaagattgcgtatgcaaatttacacttgatatttgcaagggattgtactatacttgaatcacattcaagatcttaagtatctatttttcaggcagatccgccatatttccatttttataggtttaaaagagaagtgagatttctctgttaagggtaagcgcagacggcggcagtggacagaccgcagcggcgtacagacagagagggggaggaacgattgcatcaaagggagaaatattagattgcagatatcagattatacagctgataggcaaagggggaatgggaaaggtctatctggcttatgatctcagactggagaagaactgggcagtaaaagaaatagaaagcggcagaggcggcgtgctccgggagagggatgtgctgaagaaaatgaagcaccctgcccttcccggcattgttgatattatagaggagagagggtatacctatcttgtaatggactatatctgtggaattaacttaaaggagctctgtagagcgaaaaaaaagattcccgggaagacaattcttcggtggggaatagaactctgcgatgtactggactatctgcacaatcagaaaccgcctgtaatataccgggatctgaagccggaaaatctgatcatcggaaaaaaaggaaaactgttccttgtagattttggcattgcactgattcgagacagacactcggcagaagatcggttaggaaccgcaggatatgcagccccggagcagtaccgggggagggcggccgtacagtcagatatctatggactgggtatggttctgaaagaattggttaagtgcggaagatatcagggagaggatctctgtgccctggaacagattatggagaagtgtaccagaagaaacgtcatggaacgatatcaaagtgtccggacagtaaagcacagactcaccagactgctgtacagaaagaggcagacagggctgctgtcggcggcgggggcagtatttgtaatggcagggtgtctgctccttttccaacaggagataaacatccagaagcaggaggaaacctaccaggaggctcttgaaacaggagcccggcaggagaaggatgctgcacaggcctatgagcaggctgtcaaaatgaagccggagaaggaggaggtgtacctggctttgctaaacacctatatagcaaggggagagacaaaggcgggaatacagagaatacgggaactggccgaaaggtatgagaaaaggctgccccgggagcataagctgtggacagagattggaaggctttatttcagaggcagcatccgggatccctatttttcggtaaattataaaaaagcagaggagtatttttctatggatccgaaggattccagggaaaagcgcagctacctgaatctgtgccgtatcttctcctgctatagtgacgagatcccctgggaagaggccgggaaagcgctggaatatctgcgcggcctgcttggggaggaagagaatccactggtaaaagcacaggaatgtatgacactgtgcggtgtttatttttcttacgaggaggaactgggggaatatcttgaggacccctggcaacaggggattgccctggcagaggagggggcagagtcactggagcattgcagagatcacattctttaccctgtttatgcccgtgaattatgcctgcttacaggaaaggcatatgagtacagagggatctggaacgaggcgaatgcccagtatgataaaaccttagcttaccccatgtcggagaaagaacaggttaagatcaggctgatgactgcctggaactgccgtatggagggggactgtgaaaaggcaggaggaatctatgaaagactgctgcaggactttccggaggaggcggagccctactgtgcctacagccttatggcattgatggaggaaaaggacagggaaaaggcagaggagatactggacagggggaaggaagtcaggggaatccgggagaactacagttacaagcttctcacagagcgtttaaaagaatcgggagaaagaaaggagccacaagaatgaaaaaagactggggactgatgataactgctataggcatactgcttctgattccgcggcctgttatggcaggggaatcaggtgctgttgggccggatggacagcccattaggctaaagccgggagagtgttggacgagcccgtgggcaggctatgcagaggttttggataccggaaaactgaagagccgggaagacggaaccctggaagcggtggagccgggagagacagagatcctggtaagatatacggtcaggatagaaaataatgatgcggaagagcctgtcaatgaggaggatgaaaagagcgaaccggaagtaccggagaaggaggaggttgaggaggagctgcacagcataggaagaccctatgaagtccaggattcttcctgtcctgtcctcactatgaagaacctggaggatttgtcctccaatgcctgtgcggtggctcctgaggttgcgattgaagacgaccatctggatactgggtttctaaggattcatttgcagggaaagcgtcaggggacactcacaccggtatttgcccggaaggaaggggagcgtcagatgaccttgtctttcgcacctattacggaggatgacgaatatacactgcgtctggaagcaaaagatctctttggcaattgtacagagaaaacctggatgtttacggtgaatcagaatggaaccagattttactataacggggagggggagaaagttacctactcaaaagagttcgtccccagaatccagtgggagaacccggatgaaatccaggttgtatcctgtaccgtgaacggcaaggaagtccggtgtaccatcaaagagggagaaatctatgtggacagggaagccctggaaaccggcaaaaacagaattattcttgtagtgagagacggagcgggaaatcttacaaagatggagccgtgggaatttatgatagaagaggaggaagaggaaccggacagcggcatagaggttcaggagccgttggaacaggaaagccaaaaggcatttccctgggaaggcgttttcctgataagcgggagttctctgatgttggcggaacacaggaaaaaaatcagaagatcctagcctgctggggtttgtatccgggaattaactgtgctataatgtattccattagcaacacttcattgatacggagattcaagatgcagccgtactctgtgaaataaccgagcatgaatagatacaatatacacacagaaagattgggatagcatgtggaatacaatattatttgatttagacggcacactgacagactcggcggagggaattacaaagagcgttcagtatgctttggcacatttcggaattcaggaaacagatctaaagaagctggagtgctttgtgggacctcccctgaaggagcagtttatgaaatactgcgggttcagtgaggagcaggggcaggaagctgtccgggtctacagggagcggtacagcaagattggcatctgggagaaccatgcatatatgggaataaaggagatgctggccaagctctgcaccaggggttacacactgggagtggcctcctccaagcctacacactttgtcaaacagattctggaacggtttgaacttctgccgtattttgaggtagtggtgggaagtgaactggatggaagcagaaccgataaggcagaggtgattgaggaagccctgaggcagcttcagatcagagaataccggcagagagttctgatggtaggggacaaagagcatgatgtgaacggagccagaagggtcgggattccctgtgtaggcgtggcctacggctatggcagcagggaggaactcctgagggcccagcctcttgccattgtcaattcagtccctgaactggcagcctttttaatagacggcaggctggaaagacaggaggcggcaaagccgcaggaaaccgggcagaaggataggctggatctgcacagaggaaggcccctgcttaaggtatggagggttttgtaccctgtaggaatacattttgctgccagtatcgtagcttctcttatagtgattataccaatgacggtgtatgcccttatgggagggagcgccggtgcagatgcggtgagcaccattgggcttacggggctgatggagattcttgcaatcccctttttgctgtactttatgaaaaaagaccgcatactccgtgaaaatctgggtgcggaaggaataaagacaaaagcttctcctgtccttgtactcatcttgctgtttgcggcagctgcactctctgatctgctcagccagggaatggcagtacttcggataccggacctttttccatactacggagagatgacggatgagatgtatgcgcagagcagctttatagtgattctggcagtcgtgggagtgctggcacctgtcgctgaggagatggtatttcggggactggtgtatgccagactgaaagactatctgggaggcagatgggggatcctgctgtcgggttttatcttcgggatttatcacggcaatatggttcagttcatttttgctttctgccttgggtgctggtttgcctggctgtatcaaaaatccggcaatctgctgattccaattctggctcacgttgcggtgaacgtatggtcctgtatattaacctatattccatcagactcaggcttttggacctggtatccacttttgattgttgctgagatactcattgcagtatggggctgctattacctcagccaaaattataagaaaactgggaaatccagtcagacaatttagacacaattttaaaaagaggcaatccgcatggctgtggattgtctttttttatgagcaaaacagaacaaaaagtggtaaaattgtttttacatatataaaaacttgagattaatactgatataaacagataatatttttgtatattaattaatatcaaattatctgtcaatttaatgggaaaaacctatttacaggcacgaaaaaatgtagtatatttagtgcagtgaattgctaaagataaaaagcggcaggcagttatgctgcaggagacaaattaagaaaggatggatataagatgcagaaaacaacgaataacccggaagtccagggcttatatgaaccccggtttgagcatgacaattgcggtattggtgcggttgtgaatatcaatggtgttaaaacccatggaactgtcgccaatgcgctgaaaattgtagaaaacctggagcacagagcaggcaaagatgcggagggcaagactggtgacggagtcggaatccttctgcagatatcccataagttcttccgcagggcgtgcaccgacattggtatccggctgggagaagaaagagactatggtgtgggcatgtttttcttccctcaggatgagatgaaaagaaatcaggcgaaaaagatgctggaaatcatagtagaaaaagaaggactggagtttttgggctggagaacagttcctacggttccttcggttcttgggcatcgggcggtggagtgtatgccatttattatgcagggctttgttaagcgtccccaaaatgtggagcagggcctggcatttgacagaaagctgtatgtggtgcggagagtatttgagcagagcaatgaagatacctatgtggtttctttttccagccgtaccattgcctacaaggggatgtttttggttggtcagctgagaaccttctttacagatctgcagagtgaagaatatgaatccgccattgccctggtgcattcccggtttagtaccaataccactcccagctgggagagggcgcatccctaccggctggtggtacataacggagaaattaatacgatccgcggaaatgcggataagatgctggcccgtgaagaaaccatggatcacggtgccatgagcagagagctccacaaagtactcccggtaatcagcgcagagggttcggattccgccatgctggataacacactggaatttctggtaatgagcggcatgcctcttcctctggcggttatgattaccatcccggagccgtgggccaacaataaaaccatgtcccagtccaaaaaagatttttaccagtattacgcaactatgatggaaccctgggacggaccggcgtctattctgtttacagacggtgatattatgggggcggtactggaccgcaacggcctgcgtccttcccgctactatattacggaagacggatatatgatactttcctcagaggtaggtgttttggacattgctcccggaaaaatcgtacagaaggagaggctgcatccgggcaagatgctccttgtagataccagggcgggcaaggtgttctcggatgatgagttaaaagaatactatgcctccaggcagccttacggtgaatggctggacagcaacctggtggaactgagggaactgaagattcccaacaagagggtgccggaatacacggacgaggagagaatgcgtctgcagaaagcctttggatatacctttgaggaataccgtacatccattttgaacatggcgcgaaacggaagtgagggaattggggctatgggaattgacactcctctggccgtgctttctaacgcacatcagcccctgttcagctactttaagcagctgtttgcccaagtaaccaatccgccgattgatgcgattcgtgaagagatcgtgacatgtacttcggtatatgtgggagaggacggcaatctcctggaggaaaagccggagaactgtaaagtactgaaggtgaataacccgatactgacaaatacggatttgatgaaaatcaaaagtatgaagatagaaggctttaccgttgaagtgctccccattacgtactataaaaataccaatctggaaaaagccattgaccgcttatttgtggaagttgacagagcgcaccgggacggcgccaacattataattctttcagacaggggagtggatgagaatcatgtagccattccttcccttctggctgtgtcggcagtccatcagcatcttgtaaaaactaagaaaagaacttctctggcaatgattctggaatctggagagcccagagaggttcaccatttcgcaacgcttctgggttacggggcctgtgccattaatccatacctggctcaggagacaatccgggaactgattgacaatcatatgcttgacaaagattattatgcggcggtgaacgattataatgatgcagtgctccacgggattgtaaagattgcctccaaaatgggcatttctaccatccagtcctaccagggagcccagatatttgaggcagtcggcatcgaccagactgtgatcgacaaatattttacaaacactgtgagcagaatcgggggtattaccctggaggatatttccagggaagtaaatgagcttcacagccaggcctttgatcctctgggacttgaggtagatacaaccctggacagcatgggaagacataaaatgcgccgtggaggggaagaacatctgtacaatccgcagactatccatctgctgcaggaagccacgaaaaacggagattacagccagtttaaagagtatacacatctcatagataatgaggaacggatgggtacgctcagagatctgatagactttaagtatccgaaaaaaggaattcctttagatcaagtggagagtgtggaggctattgtaaaaagatttaaaaccggagccatgtcttacggttctatctctaaggaagctcacgaaacgctggcaattgccatgaacactctccacggcaaatcaaacagcggagaaggcggagaggactacgatcgcctggtaacaggaaaggacggcaaaaaccgctgctccgctatcaagcaggtagcatcgggccgtttcggagtgacctccagatatctggtcagcgcccaggagattcagattaagatggctcagggggcaaagccgggggagggcggacatctgcctggaggcaaggtatatccctggattgcaaaaaccagacattcaacccctggggtgagtctgatctctcccccgccccaccatgatatctattccattgaggatttggcacagcttatctatgatctgaaaaatgccaacaaaaatgccagaatttccgtaaagctggtatccgaagccggtgtgggcacagtcgcagcaggtgttgccaaggcgggtgcccaggttatcctgatttccggctatgacggaggcaccggagcggcgcccagaagttctatccacaatgctgggctgccctgggaactggggctttctgagacccaccagacactgatacggaacggactgcgcaataaagtagtcattgagacagacggcaagctgatgagcggccgccatgtagccattgccgctatgctgggggcggaagagttcggttttgccacagcaccccttgtaaccatgggatgtgtgatgatgcgtgtatgcaatctggatacctgcccggtaggcgtggcgacacagaatccagagcttagaaaacggttccgggggaaaccagagtatgtcattcattttatgaaatttattgcccaggagctgagggagtatatggcagagcttggcgtccgaacagtggatgaattggtagggagaaccgatctgctgaaagtaaaggatacgatccaaaacagtaaggcatcaaaggttgatcttgccagaatactggataatccctatgcttccccaaaggcaaaagtaacctttgaccccaggcaggtatacgacttccatctggaaaagacagccgatgaaaaaattttattgaaacggctgggctctgcgctggagggaagacagaagaagagcattgaagtggatgtgtccaacaccgacaggtcctttggaactatcttcggggctgagataaccaggagataccaggacagcctggacgaagatacttatacagtgctctgccacggggcagggggacagagcttcggcgcctttatccccaaaggtctgaccctggagctggagggagacagcaacgactatttcggaaaagggctttccggaggcaagctgatagtgtatccccctaagagcgtgcagtttaagcaggatgaaaatattattatcggcaatgtggctctctacggtgccaccagcggaaaggcttatgtaaatggcgtagccggagaacgcttctgtgtgagaaattcaggggcaattgcagttgtggagggcgtaggagaccacggctgtgaatatatgacagggggccgtgctgtggttcttggaaaaatcggcaagaactttgccgcaggaatgagcggcggtgtggcatatgtgctggacgaagacagcgatatctatacaaaattaaataaacagatgatctccgtgtcaaaaatcacatctaaatacgatgtgcaggaattaaaagaaatgattcaggatcatgttacctgtaccaattcggaaaagggaaaagagattctgaataactttggagaatacctccccaaattcaagaaaattatacctcatgattacagccgtatgcttcagacgattgtgcagatggaggaaaaagggctgagcagcaaacaggcacagattgaagcattttatgccaataccagaagataggagggaaaagaagatgggaaaaccaacaggatttttagactataaaagaaaaacatcagatgcagaagcaccggaagaaagaataaaacattttaatgagttccatgttcaccttcctctggaagagcagcagctccagggggccaggtgcatggcctgcggggtgcctttctgccagtcgggaatgatgctggcggggatggcctctggctgtccgctccacaatctggtgccggagtggaatgatctggtgtatcttggcaactggaagcaggcataccggcgcctgaagaagacaaataattttccggaatttacttcccgggtatgtcctgctctctgtgaggcggcctgtacctgcaatctggacagtcagcctgtatccacaaaagaaaatgaatatgcaattatcgaaaaggcgtatgaagagggatatgcaaaggccaatcctcctaaggtccgaaccggtaaaaaggtggctgttgtggggagcggtccctccggcctggcagctgcggatcagctgaacagcagggggcattccgtgacggtatttgaacgcttcgacagaatcggaggtcttctcaggtatggcataccaaacatgaagctggacaaatccgtcattgatcggaaaatcgcagtcatggaggaggaaggagtagagtttgtcacaaatgcagatatcggcaaaaactataaggctgaggatctcctgaaaaattatgacagagtaattctggcctgcggcgcttccaatcccagagacatcagcgcgccggggagggatgccaaggggatccactttgcggtggatttcctgagggctgccacaaagagcctgctggattcggaatttgcagataaaaaatatattgacgtgaagggaaagaacgtggttgttatcggtggaggcgacaccggcaatgactgtgtgggaacttctatccgcctgggagcagccaatgtaacgcagctggagatgatgccaaaggccccggatgtgcgggcggcgaataacccttggccagaatggccaaagatctgcaagacagattacgggcaggaagaggccattgctatgtttggtcatgatcccagaatctatcagactacagtgaaagaattcgtgaagaataaaaagggagagctggaaaagctgattacggtaaagctggagagcaaaaaagacgagaaaacagggcgcatggttatggcgccggtggaaggcagcgagcaggagatgaaggctgaggttgtgctgatcgcagcaggttttctgggcgcccagaagtatattgccgatgcctttaaggttgatctttccccccggacgaatgtggccaccagagaaggggaatatgctaccagtgtgcctaatgtattcacaacgggagatatgcacagaggacagtcactggtcgtatgggccatccgggaaggccgggaggcagccagagaagtggatatcagtctgatgggatactctaatttatcggtgcagtgacgaaataataaaaggggagaagaaatctactgaaaagatttcttctccccttttttgcggaatcaggattcctgcagcattgcttttccgattctgtgcttctttcgatacagattgggggtaacgcccgcatattttttgaaagactgagaaaagtaattagaggaagaaaaaccggtcatatgagcaatctgagtaatgctgtaatcggaattcttcagaagctccttgctgttcaggattctccgctccagaagatagttaatgggtgaggtctcataggcctttgaaaacatatgggacagataaaacttgttcaagtgggacagctccgcgagagaatccagggtaagggaatcctggtagtgggtatcaatatactctttcacgaactcgcattcagccggaatatctttgggggctgccagtgaaaaactgtcgccggttattctctgggtccgcagaagaaaaatcataaaataatgctggcagatctgctcataggaactttttttgtgctttacctcatccagcatagtctgaagcagaggaaggatgctgcttctgtggttctgaaaatcatagatgtgacagtccagggtgtcggagaaaaactgaaaacggagattttctatccccagtgcaatgtaaaccagtggtttgtctgtagatgacttttctgtgtgctttacattgggattaatgataattaaagtgtctttgcagatgggaaactggtgagattccgtgcaaaaatatccgctgccttccaccacataaaataattctgcaaagctgtgggtatgaagcaggctgatccaatcctttccgtaagaggaagaggaaatatataataaacgttcaagaggctgacggttgtagacctcagccatggaatattgtacatgtgccataagagactccttaaaaaaataatagtataattatagcattttcagtggggaaagacaagatatataacttattgagcaacaatggagttgaaggcagaaaactatttttttatactgaatttaatcatgtagatctagtaacagaatgcagaaacgggaaggtaaggagataaactatggaagagtatggttttggaagagtgacaataccaacagatatggatattgtacaggagacaaaagaagtggtaaagcgctggggggcggatgccattcgggactgcgacgggacagattatccggatgaattaaagaatatcggagttaaggtatactcaacctattatacgacccggaaagataatgagtgggcaaaggcgaaccctgacgaaatccagcagatgtatatcatgacttcctttcataatgcagacaaagagaagctcagcattcatttaatggaccatctctatccggatatgctgaaggtgaatacccgggatgatataaaaagatggtgggaagtcatagaccgcaccacaggtgaggtggttcctgtggaccggtggaactatgacgaagaatccggcagtgttgtcatagagcctgccagcctttatcatgagtatacggtgagttttctggcttatattatgtgggatccggttcatatgtacaactcggtcacaaacggatggaaggatgtggagcatcaggtgacctttgatgtgcgtcagcccaagaccagagcttattccatggagcggctgcgccgttttctggagaaaaatcctcatgtgaatgtggtacgttttacaacgttcttccatcagttcaccctgatatttgatgaacttgccagagaaaaatatgtggactggtacgggtattctgcatcggtcagcccttatatactggaacagtttgagcaggaggcaggctaccggttccgcccggaatttattattgatcagggatatatgaataacacctaccggataccttccagggaattcagggactttcaggattttcagcgcaaagaggtagccaaactggcaaaagaaatggtagatatcacacatgaatacggcagagaagccatgatgttcctgggtgaccactggattggcatggagccctttatggatgaattccaaagcattggccttgacgctgtggtgggaagtgtgggcaacggttccaccctccgtcttatcagtgatataccgggggtaaaatatacagagggaagattccttccgtatttcttcccggatgtcttccatgaaggaggagacccggtgaaagaggcaaaagtgaactgggtaactgcgagacgggcgatcctcaggaaacccattgaccggatcggctatgggggatacctgaaactggccctggaatttccggaatttatggactatgtgcagagcgtgtgtgaggaattccggcttttgtattccaatataaagggaaccactccttactgcatcaaaaaagtggctgtcctgaactgctggggaagaatgcgtgcctggggcaatcacatggttcatcacgcgctgtattataaacagaactattcttatgcaggcattatagaggctctgagcggtgcaccctttgcggttgaatttatcagctttgacgatatccgcagggacgaacatctcctggacagtattgatgttatcatcaacgtgggggatgccggcacggcatacagcggaggtgaaaactggatcgatgagaaaatcattacggctgtgaaaaaatttatataccagggaggcggttttatcggtgtcggggaacctgccgcctatcagtgggaaggcaggtttttccagctggccacggtaatgggggttgaggaagaaaatggattcaacctgaataaggataagtataactgggaagaacatgcgcactttatcacagaagactgccggggtgaaattgactttggtgagggaaagaagaatatatttgccctggaaggaacaacggttctaaaacagattgacaaagaagtgcagctggcggtaaattctttcggcaggggaagaagtgtatacatcagcgggcttccttacagttttgagaacagcaggcttttgtaccgggctgtgctttgggccgcgtcagacgaagaaaatatcagacactggttcagcacaaattataatgtggaggtacatgcctatattaaaaataataaatactgtgtggttaacaatacctatgagcctcagagtacggtagtgtaccggggagacggcagcagcttccgggcagagctggatgccaatgagattatatggtatgagatagggtaagggggcttatgccccctttattttgtgtgctggaacggatattctgtaaaagaaatactcagatccattccatccacagttacgggcaggatactgtagccggatgcttttaggttttcaggcttccagtgatccagcatcaaataaaagtgtccgtctttttcaaaaacaaaggtactctggccgtaaaaggttttgcggtaattttccccctcgcagggattgtcgatgagcttccagcctgttaaaagattagaagagatgccgtacagggcgctgttgggatcccagccggtgcagccggaggtgatcatataatacaggccctggtgaaagaaaacagccggggcttctctctcctgatctggaaatatctttgtgcagacaccggtaaagtgaagataatcctccgtcaactggctgattcggagcgttttattccagtctgagctgtgaatcagatatacgcgctgatccagatcctgaaacagagtcatatccctgcagtccgagcgattgggaatatcactgtacaaataggtgaatgggccggtggggacgtctgctgtagctacgccggctctggcggagcggtagtccggggtatctatatgcatccacatgacaaattttccggttttttggttgtagattaccttaggacgctcgcagaccatatcacggtataaatcactgtccggtgcggcagaagcaggaaggacaatcccctcatttttccagtccatgcagtttttcgacgaatagcaggagatacctatgaaatctacccggatatcaccggagggagcaaaggaagtcgggccgtttttgttttctccgtaccaataataggtatcgccgtgctgaagaatcattcctccgtgagcctgaataggatttccgtccgtatcataccaaagagtgccatttttattcatatttgctgtacattcctttctcttttgaagttgccataattataaaggcaggatacttttttttcaacctggaaatttattggaaatgatagctgccaaaatctacacagctcatattgtggttgaaatgcactgattattttaataaaatagtatttcttttgtgtaaaaagcaaaatatataaaagtaaagacaagatatttatagaattagaagtaaaactaggctatgataaaaacatctcaaggaaatatcatttatggagggaaaaaggtatgaaaaggaaagaagtaacaagatggcttgctttgggacttgcagcagtaatgtcaaccaccattctcgcaggctgtgggaatacagacgacagttcaaagggtggtgatgacgctaaaggggacgggggacaggtgctgaaagtagctgcatttgaaggcggttacggcgcagaactctggagtgaggtcgccaaagcgtttgaggaaacccatgagggtgtaaccgttgaactgcaggttgataaaaagattgaagataagattacgcctgctatgaagagcggtgactacccggacgtaatccactgtgccacaggacgagatgccggtcttactgagacaattacaaaggaaaaaggccttacctgtctggatgatgtgctggatatgacagttccgggagaagaggtcacagtaagagaaaaaatccttccgggatttctcgataccctgggaactatgccttacaatgacggaaaaacatattatgcgcctatgttctacagcccctgcggacttttctacaacgcaggcctgctgaaagaaaaaggctgggaagttccgaagacatgggatgaaatgtgggagctgggtgataaagcaaaagctgagggaatctccttattcacctatcctcatgcgggatacttcgacgcatttatctacgcaaccctggagtcttcgggcggtgcggatttctataacgaatgcatgacgtataaagacggcatatgggaatcaccggaggcaaccgcagtattcgagacaatcggcaaactggcacagtatgtagaacctacaactctgggtaatgccaatgaagaaagttttacaaaaaatcagcagttaatcctggacaacaaagcaatcttctgtccgaacggaacctggcttccgggagaaatggcagatgcaccgagagcagaaggatttgagtggggattctcagcagttcctgcagtatcagattctcagaaaccttcttcctttaccttctttgagcagatgtggattccggcggaaggaaagaaccaggatctggctaaagagtggattgcatttatgtactctgacaaagcagctgacatctttgcgaagtctaatgccattcagccaatagttgggatttcagaaaaacttacaggcgacaataaaatgttctacagtgtatatgataacgacgcagcagtacctgtaatgggcggattcgcctctactaatccggtggaaggtgtatccatgaatgacaccctgttcagggcagtggatagtatcgtaagcggagataaaacagttgcagactggcagaagtcagtagaggaagctagcgataagttaagagaagctatggagtaatctatacaacaggaaaaagggcattctataatgtccttttttcttcgcaaaagggagaaaggaggaacgggaatgaaacataggaaaggaagaaatggttttattgcagtgtgtgtgctgccagcagttattcttttcataattttcatgatagtcccaacaataaatgtatttaaaatgtccttatataaatggggcggattttccaataacaagacatttgtgggattgaataattttaggatactttttgaggatcccaaattctatcggtccttccagaactcagtactgctgattgtgatggttactattattacaatggtattttcccttgtctttgcagcgattctgtccagagaaaagatcaagggccagaacttcttcagaattattttctacatccccaacattttgtctgttgttgttatatcagccatcttttccgcaatttacgaccccagccagggtctgctgaacagtatcctgtccatattcagaggcgcaaaagcggatcctattctgtggctgggcaatcaaaagctggtaatctacagccttgtcatcgctatggtgtggcaggcaatcggatattatatggtaatgtatatggcaagtatgtccagcgtaccggagagcttatatgaatcagccaatctggaaggagcgggaagacttcatcaattttttaatataaccctgccccttatctggacaaatatcagaacaacacttaccttttttatcatcagtaccattaatctgagtttcctttttgtcaaggccatgacaggaggtaagcccgacggagccagtgaagtatttctgagctatatgtacggccaggcgtatacgaactcatcttacggatatggtatggccataggagtgattgtattcttgttctcatttggattggctggacttgtaaacctggctacaaagcgggagccgctggaattttaggagggtgagaatatgaagaaaaatggaaaagacacgctgtataaggtgttcatatacattgtactgctgcttctggcaatcagtattgcagttccagtgggctgggtatttctggcctccgttaaggaaaatgcagagttctacggcaatccatggacactgcccaaaggcatttattttcagaactttatcgatgcctttcagggtgccaaaatgggagaatatatgcttaattccgtcatagttacggtattagcgctgctgcttctcctggtaatcgcgctgccggcagcttatgttctggcaagataccgcttcaaaggcagcaaactgtgtaatattatgtttatgggaggtttatttatcaatgtaaactacattgttgtccccatattcctgatgtttgtggacggagacaaattcctgaaccgggtattcgggagcggttttctgttaaataacctttttgtgctggcgctggtatatgcctccaccgcactgccctttaccatttacctgctgtccggtttctttgtatcaattcccaaagattacgaggaggcagcttttgtagacggtgccgggtatttcaaaacgatgttttcaattatgatgcccatggcaaggccaagtattataacggtaattctatttaacttcctctccttctggaacgaatatatcattgccatgaccatgctcacaggagaatccaagacacttccggtaggactgatgcagctgatgcaggcacagcaggcagccgcaaactatggccgtctctatgccggtctggttattgtaatgctgcccacattgattctgtatatctgtgtgcagaagaaactgacagaaggtatgagccttggaggactcaagggctaggagagaacacaggaggtgtgtgttatgaagaaatggatagtgagaattattggcctggtgctttttattgtatgtcttgcactggtaattcacggtcagagaaccgtaggggcaggctatcttctggaaatgcttgccggtctgttgggaatcctaattatgctggggatctataacaaacagcaccagtaggtctgaggggatgtgtctgattatggcacatcccctcgagtttcgccggggcgctgcgatgattccctgtgcctggctggtttcacaaaaagtttattttctcggccttgacagtacgcgcgtgagtatcatataataagttagcgattcgtttgtatgatgtatacggctaaagctgtatgaacacccaggggcaggcattgcagcgttccgggtacactttactacagggggtagtaaaggtttcgacaggggtttcgaagatggtgaagctatccgcaggtgatgcgttaaatcacaaccttaaattaaacgcagacgaaaatttagcgttagctgcctaattgcagcttgtcagccttagagcactcacactttaagaatctggcatcgactttgtgagaaactttatcggcaaagctttgagccggtagacgtaatatgaagctactgaacccaccagggtgttagttcccgggtggcagagggaatgtaaaagaactgactatgatagtagaagaacatgggagaggcttttggacacgggttcaattcccgtctactccatttgaacaaacaaaatccgaactcgttatagagtttggattttgttttatgtgtagcaccccaattttttaattgtaaagatgaataatagaatgtttatgaaagagtcttatgtagcagactctttttttgatggcgttttgtcgaaattagtcgaacgattaaaattgattattgaataaggcgatagtataattgaagaaaaaaaatagtgagcgtaatacggatataaatcgttaaaaataatatatagttaataaaattagaaaacttataactatgcataaaaatgccaaatatgtacatatatattggctttattaaggaggtacggtccaatggagaattaaaaagatataaatgaactgaaaaacaaatgaacttgggagggcgttatatgaaaaaaagaaaggcaaagttaatgatcgcattggtggcagctgctatggtaatcggaagctgtccaaattctgtttatgcaagtgagacgggggaagatattgtaataaattctggcgaagatgaagtggaaggcgcagatcaaattccagaggagcaaaattttatagatattgaggatgaaaacactgatacggagaataaaggtcgaaccgatgaggcggcagatattcaggaagactatgctccatacgaggcagttgattatgtagaagatgaggcaagttctacagaagagcaagaagaacttcaagagaatgtccagtaccttgcaaatgcagcgatttcaggagaatgggtacaagaagaaaacggactgtggtggtatagacatgcggatggatcttttacgataagtgactgggaatacattgatggcgaatggttttattttgaccattacggatggatgcagacgggctggatacaactagagggtaaatggtactatttaaaaaattggggagctatggctaccgggtggatggtgatagatgatgagtacttctatttccaaagtgatggtattatggtcacaggctggttacagctggatggcaagtggtattatctaaaaaactggggagcgatggcaaaaggatggctgcaggttgaagataattactattatttttctgatagcggtattatggctacaggctggctaaaatatgaaggaaagtggtattatctaaaaagctggggcggtatggtgaaaggctggttccagctggaaaataagtggtattatttttatgacagcggaattatggcagttggctgggtacaattagaagataaatggtattatttctatgccagtggggctatggcaactggctgggtacatctaggtgtaaatgattattatttttatagcagcggagtaatggcaattggctgggaacacataggtgctaattattattactttgaaactacgggagttatggcggccaatcagtggaagaagattggcgatgcctggtattacttttattccaccggggtaatggcaaccggatgggtagacgtaggaggaaaaacttattattgcaaatctacaggagttcgcgtaagcggaacttaccaggttgaaggaatcccatattacttttccagtgacggcgttcttgatatgggacaatcagtagtgaattatgccatgcagtttatcggcaatccttatgtatggggcggagaaagtctgaccaatggatgcgactgttcaggctttacgatgaaagtattcgaaaaatttggaattaaaataccgcgcacatccggtgaacagagaagcagtggtacggccgtaggttctttatcagcggccagaccaggagatcttttgtgctatgatggacatgttggtatctacattggaaatggagaaatggttaatgcttctaattcagcaccatttccggacggaggtattaaattaacccctgcaaactacaggacaattataacaataagaagacttgtttaacaaaaactagccctggtgtattctgccagggctatccttgaatattctggttattaaaagaattaatgaaggagagccagcacccattcggatgctggcttgaaaaagaaaaagttttgcgttaggttgttggcctcttaacaattattatattacaggatgattgtgacgaatctgtgatgagaatctaaagtaacaggaaagactttctaaagaatttttaaaaggaagctctcgttctttttccttagccgacagtttcttttaaactctgataaaaggccatcataccttccgtcatcagcttatttttgcgtgtggcataggtgatttcccaagtaaaatagggatccggaaagggataatacctgaactgcgaatcctttttgggaatggtatgctccggcaccacaaacaggttccctgtgtcaaaggcaagctctttcagggaattaaaatcgtttgatgacagaaatacccggggagaaaagcccgcgtgtctgcaggaatcccaaaagtggtgctggatataaaactggtcgctgaacatgacaaaggtataggcagccaaaccctgcagggtgatttcctgtgcctcatacagtgggtgtctggaagggatgcatagatataccttttcggcctttataacttccatctggagaccctcgcaattcactggtccggcaataagtgccagatcacattccccttttaataacctgttctcaagagtgatatctgtataatcgctgtaattcaactcaatatagggatgttgggttataaaatcggataaaaagttgtggggcagagcggagagaacgccaaaggacatacctaccagaagcggctctctggctgtggatttcatctggaggacataggaggatatgtactctttttttctcaggataatttcaaattcctgcagcacataagttccgtagttagttaaagtcaccccgctgctggtccttttcagcaattggcagcccagttcggcctccaggtcaagcagtgcctttgatatcccctgctgggatatgcgcagcacggcggaggctttgctgatacttttgcatttgcatacagtggtaaaaaattctatttgtctaaatgtcataggatccctccctgcacaaagatacaatatttttcttgtagggtcacaacgaaaaggattcttctaataaaagaatcggtatgttatatttataacatattaaaacaggatgtacaagcaaacgaggaggtatatctatgaacaataagtattatccaaatctggcaagccccataaccatcaatggagtcacctttaaaaataggattttcggtgctcccatgtcaaatccggagctggacccagactgccatatgagaaaagaggatatggcatttcacgaaaaccgggcacagggcggccttgcaagcgtagccatagggcttggcattgtggatgctgtgggcaggacccataccaaggaggttacactttacgatgttatgtcactgccatccctgaaggagatggcgaaggctatgcaccgtcacaactgcaatgccgttatggaacttgcccatgggggaaaatatgccaacgccagaagccatgacggttcttccggacagtgtgcaatcggtcccaacgacgaaattaacccggatggccttaccgtgcgcagcatgactgaggaggatatctacagagttgcggattgttttgccagtgctgcaaagctggtaaaagaggcagggtttgacatggtactgatccatggagggcacgggtggctcttggggcagtttatgtcgccgtctatgaataagagaacggacagatgggggggcagtttagaaaaccgtatgcggttcccacttctggtaatcgaaaagattcgggaagcagtgggatgcagattccccattgaataccggatgagcggggcagagttcacacccggcgggtataccgttgaggaagggatagagatggctaaggtgcttgacggaaaagttgatataattcatgtctccgcaggtgtccatgaggatccggaagtatttgtaattacgcatccatctatgtttatcgaacacggatgtaatgtattcctggcagctgaggtgaaaaagcatgtaaagaccccggttgccaccttaggtggactcaacgatccagatatgatggaagaaattattgcatccgggaaagcggatattatagagattgcacggcagtctatctgcgatccctatttcccggaaaaagctttttccggaaagaaagatgatattacccgctgctgccggtgttttacctgtttttacaattatctgacgaacagaacctattcctgtgcttttaatcctgtggttggaaatgagctggaaaataaatttggatttcccgcgacttctcccaaaaaggtagtagtcgtaggcgggggccccgggggaatggaggcggccataacagcagccaaacgcggacactccgtcactctctatgagaagaacagccgtctgggaggacagctcttatctgaggagcacattccctttaaggcggatatgttccagtttgtcaaagtactggaacggagactccataaagccggggttactgtgaagctgaatacagagcttacagcagagcaggcggctgaactgggcgctgatgtcatcatgacagcggttggagcaaagccaattgtacctcccattcctggtatagataaccataaagtggttacactggaagctcttcatcaaacgcctcctgcaattggacagaaggttgttattcttggaggcggccttgtgggaagtgaatgtgccatctatcttgacgggcttgggaaagaggttaccattgttgaaatgaaggatgactgggcagcggattcctatttcatgcacaaaaatgccatgaaggtttatatgaaggacagtactattaaaatacaggtcaataccacagccaaagccattactgaggaaggtctcctgtgtactgctcctgagggagaggtcctttttgaggctgacaccattcttctggctgcaggtatgaaagcagatcgtaagacggcggaaagcttttataatgcagcgcccagagtctttgagattggagactgcatcagggcaggacgtgttgtagatgccgtttctaacgggtattaccgggcaattgatatttaacaagagataaagacaaataaaagctgcggcaggtgacgaatagttgcctgccgcagcttttacacatgctggccggtttggttgcaatgtgtctgtacagagggtataataaggaaaagcttttgaaaagacggatagaaacctgtttttctaggaagagtaaaaagatccggaaatttcacagttctaacatatttgattgatatagttaagaaagatagatcatgttggaggaagaccagatggaaaaatgtaagatattagttgtggacgatgagagcaggatgagaaaattggtccgggactttctggtaaagcaaagctttgatgtgctggaagccggggatggtgaagaggctctggatattttttatgggacaaaggacatagcacttattatattagatgttatgatgccaaagatggacggctgggaggtatgcagggaaattcgcaaggaatccaaggtccccatcattatgctgaccgccaggggggatgagagggacgagcttttgggattcgagctgggagtggatgaatatatttctaagcccttcagccctaagattctggtggcaagggcagaagctatcctgcgccggacaaatcagatagcatccgacgatatcctgtccgctgggggaattgagctgaataaagccgcgcatatggtgtctattgacggagaaaacgttgaactcagctataaggaatttgagcttctggcatattttatggagaatcagggcattgctctgtccagggaaaagatattgaattccgtatggaactatgactactttggggacgcccgtaccattgacacccatgtaaaaaaattaagaagcaagatgggagacagaggggaatatatcaaaaccatctggggtatggggtacaagtttgaggtatagacatgaaacgatcattgaataaaaaactggcatttacctttaccgggctaatgctggtaatgcttctggctatcggattgatcaatactttttttctggaatcttactatacctcaaaaaaggaagatatgctgaggacagtttacggtaagatcaacgaattggtagtgacatccaatgtgagagactccgatgtaacctcagagttcagaagatactgctcagagaagaatatctcctgggtggccagcgactaccagtcctaccgtatcgtagagggcagagagagtgatgtattatatcccaccctctttgggtatatcaatggcctgcgcaatgccaacggcaaagcagtaaagcagaccgatgattatattattcagaagattcaggacaccaacctgcagaccgattatctggagatgtgggggaagctggagaacagcggatattttctgatccgcacccctgtgggaagcattcgggacagcgtgcagatttccaatatgttttatatttatattggtttggtgatgattcttatcagtatagtaatcatattgtttttcagcaggagaatcacaaagcccattacagaacttacggatatttccaggaaaatggcggatctggactttaatgccagatacaccagcggggggcaggacgagataggtattctgggagataactttaaccggatgtccagggaactggagacagcaatctcaggcctgaaatctgccaacaacgaactgcagaaagacatagagaagaagattcaggtggatgagatgagaaaggaattcctttccaatgtatcccatgaactgaagacccctattgccctgatacagggatatgcggagggcctgaaggaatgtatcaatgaggatgaagagagccgggacttctactgtgatgtcattatcgacgaatcagccaagatgaatgagatggtaaaaaagcttctgactctgaatcagctggagttcggcaaggatcaggtaaccatggagcggtttgaactgacagaattaatccgtggcgtggtgcagtctaccaggatactggcagaacagaaagaagtaagggtgatcttccaggaggagaatcccgtctatgtatggggggatgagtttaagatagaggaagtggttacaaattatgtatccaatgctctgaaccatgtcaaatacagcaataccatagagattcggatccttcaggaagaaagaaaagtgagggttactgtgttcaatacaggagatcccataccggaagaggatttggataaaatctggataaagttttataaagtggacaaggcaagaaccagagaatacggaggtagcggcattggactttctattgtaaaagctattatggactccatgaatcagaagtgcggagtacagaattatgacaatggagtagaattctggtttgagttagaaaaacagtgaaaatgatcgaaagagggcatgtcagatgccctcttttcgtgttttcatccgttgtatattttttttagctgtgttaaactatccatgtatgcttatgccatacctggcatggagtgcgctccgaagcaggaatacaggggcgtttttgaatatttaaggaacgaacggggaagatacatatgattgcaatcattgattatgacgcaggaaatataaaaagtgtagaaaaagcattcgcccttctgggggaagaagtagtgctgtccagagacagggaggagatactgtctgcagatcgggtagtccttccgggggtggggtctttcggcgatgctatggggaatctgaacagatacggactggtaccggtaatacacgaagttgcagagaaacagatcccttttctgggcatctgcctggggcttcagcttatgtttgaggagagtgaggagagtccgggcgtggaaggactgggtctgttaaagggtaaaattcttcacataccaaagcaggagggtctgaagatccctcacatgggatggaattctctccatatacaaaatcagggcaggttatttgacgggataccggaagaaacgtatgtctattttgtgcattcctattacctgaaagcggatgaaccatctgttgtcaaagcaaccacagaatacagtacgcagatccacgcttctgttgagaaggggaatctctttgggtgtcagttccatccggagaagagcagcactatgggacttaagatgctggaaaactttacaaatatacacagggagggacgctgattatgtttaccaagagaattattccctgcctggatgtgaaccggggcagagtagtaaagggtgttaattttgtgaacctccaggatgcgggtgacccggtggagatcgcaagggcttacgataaggcaggtgcggatgaggtggtttttctggacattaccgcctcctcggatcagagagatacggtagtagatatggtccggaaggtagctgccaatgtgttcattccctttactgtggggggaggtatccgaaccgtggatgattttaaaatgctcctgagggagggtgcagataaaatctctatcaattcatcggccatcaatacaccggatttaatcaatgacgctgcagacaaattcggcagccagtgtgtggttgtggcaatagatgccaaaaagcggccggacggaagcggatggaatatttataagaacggcggacggattgacatgggaatcgatgcagtggaatgggccagagaggcggcaaaacggggtgccggggagatacttctcaccagcatggattgcgacgggacgaaagccggctatgatatagagctgaccagacagattgcccaggcagttgatatccctgtgattgcatccgggggtgccggaactatggagcatttttatgaggcgctgtcttcaggaatggcggacgcggctctggcggcctctctttttcactataaggaactggaaatcaaagaagttaagagatacttacataataagggtgtttctgtcagattataagaacaggaggaagtgcatatgccccctttacagggagagtggctggaagccttaaaaccggaattcagcaaaccatactacaaaccgctttttgaaaaaataaaccaggaatatcagacaaaaagggtgttccccccggctgacgatatctttaatgcctttcattttactcctctggaagaggtaaaggctgtgattctgggacaggatccttatcataattacgggcaggcccacggcttatgtttttctgtaaagccagaggtggatattccgccctctctgattaacatataccaggaactgcacgatgatctgggctgctacattcccaaccatggatatctggaaaaatgggcccgccagggagttctgatgctgaacacagtgttaacggtgagagctcaccaggccaattcccatcagggaatggggtgggagcagtttacagatgcagccatccgtattctggatgaaattgaccggcccatggtatttatcctgtggggcaggccggcacagatgaaaaagagcatgcttcacaacccaaaccatcttattctggaagctccccatcccagtcctctgtccgcgggcagagggttcttcggaagcaggcctttcagccagacgaataattttctgcaaagccatggaattgcgccgattgactggcagatagaaaatgtataaaacgaaggatgaataattatgaaacaaaagaatacttttttgaagaatgcatcatttctcatgattgcggctctggtatccagagtcatcgggcttgtataccgaattcccctcaatgctatcgttggcagaacagggatggggtattacagctttgctttttcggtatactctatactgcttttaatttcttcgtatagtattcccatggctgtttctaaagtagtatcagaacgtctggctcttggccagtacagaagtgctcataaggtttttaagggcgctatgatctatgcctgtattgttggagggattgcagccttggtagctctgttcggggctccctatctgatccctcagaatcagccaaatgccattccggcactgcaggtattaactccaaccatctttttatctgctatcctcggagtcctgcgggggtattttcaggcacataatacaatgattccaacatctgcttcacagatcatagaacagattctgaatgctattgttagtgtacttgcagcgtggctgctgattaagtatctggcggcagatgccgtagaggaagctacctggggggccgccggaggaaccgtgggtacgggagccggggtgctggcaggtctgctttttatgacctttgtatattatattaaccggggcacgctgagacgtcagttgaaacgggatcgtacaggggtggacatcagctaccgggaagtattccggattattctgctgatggtgacgccggttattttcagtacttttatttataatgtcagcagttatattgacggttacatgttctcctcaattatgggcagacatagaattgatgacgagctgatcagcgcaacctatgcagaattcagcagctactatatgactctgattaatatacccctcagtctctccagtgcatcctccacggcggtggtgcctaatatatcgggacattatgcccggggggagatctcaaaagccaatcaaaagatagatgaggctgtacagctgaccatgtttatctctgtcccggctgctgtggggctggcggtgttaggccaccctattattcagctgtttttccccacaaccacaggaattgcgggcaaccttcttatgattggggcggtatccatagttttttcctcgctgtctaccataaccaacggcgttcttcaggggataggaaaaccccagattccggttcgcaatgcagccattgcccttgtgctcaatgtggtatttttgttctgtggactttggtttaccgacaagcttgggatcatagcagtgctggtggccactatcctgtattctgtcagtatgtgtatcctgaatgggatctatctgaaaaagtatctgggatataagaatgaattcagagactcctacggaaagccttttctggcctctgccgggatgggacttgtggcctgggggagctattatggattgcatcatttacttccccataatattgtttgcctggctgtggcagtgcctctggcagtgttcacatatattattctctttgtagctattgtgaaggcgcccgaggatcagctgagaagactcccggctggaaatattatctataaactggctaaaaaactgcgcttatataaatgatttttgggccgctcttattagcatttgattagtccgcaaagcctttcacaggctatgcggactttttcctttccaggaactgcgctgcggtatcctgtgaaagaaaggtcttccggaactgaaatttggttagccggattaggaagccccattgctattataccgttaaccgtatataatgtgggggaacttatagagcaggaggagtttttatgaagcagagtaaggtcttgttaatagacgatgataaagatttgtgtatgttgattgaaagagaactgctgcaagaaaattatgaggttacggtaaagtacgatggtaaaaccgggttggaggcttttgaaaataataagtatcagcttgttgtgctggatattatgcttccattcttcaatgggtttgaggtattagaaaacatacgaatcaaggatcatgtgcctgtgttaatgcttacggcaaaggactccgaagtggataaagtaacagggcttaggctgggagcggatgattatttaacaaagccgtttttaatgagtgagtttgtggcaagggttcattcactgatcagaagatacactgtctttaatggccagtccgaagaaaattcaacactgcattttaccggcttagaaattaattactcattaagaagtgtctttgtaaatacggaagaagtccggctaaccgccaaagaatttgatcttctctattttttggcttcaaaccaaggcagagtattcacaaaagaacaaatttataatcatgtgtggaagaatgagtattcttttgacgatagaaatatcatgtcctttatcagcaaactgcgtaaaaaaataagaaatgagcagatggatttagattatattcaaaccattcacagcattggctatcgcttccgcacagaggtgtaatcatgttagggataattattactgttttaagtgttattattatctttcaatttatttatatctgcaatacgaagaagcagatcaaggaaatttctcatattctggatgatataggcagcggcaatttagacagaagactgctggccgttgaaaatagtatagttagtgaacttgtttacaaaatcaatgctatcgtgatccgcgataaagaaaaacttatggaaaaagacaagtcggaaaaggcatataaaaaattagtcaccagtttatcccatgatatccgcacaccattagcttcacttatcggatatttggaagtattagaaaagaatggtgttaccggtgaggagcatgatgagtttttgactatcgctaaaagaaaagcacttaatctgggggattatatacagtcattatttgaattcttaaaaatagagtccggcgaatgggtttatgacttaaaaaagcagaatatatgtgaattaacccgcttgatacttgcagattgggttataaaattggaagaaaacaagatagagtttaggtttgagataccggaggaagctgtatatgtcgttcttgataaaagcgcgtataccagaatccttactaatttgatggcaaatatgatcaggcacagccatgccacacaactgtcggtccggataagctgctcccttaatgaacttaatctttcaatcgctgataatgggattggaatagcagaaaaagatttaccatttgtatttgaccgcttatataagtgtgacacatcacgaacggaaaacagcaacggtctgggtttgtccatagccaaagagctgactgcttccttacatggagagattcatgcagaaagctgctggggcagaggtacaacttttcggctgacttttccaaaagcatgaataaagcataattacggcaaggtttcagcagggtttctatgctttaattgtaataggaaaaggagggcggtatatggaaaaccagataattctgcgcacgaagcagctgactaaaacctatgggaatgttatggctgtggaaaaaattaatttaaacgtaaagaaaggtcgtatatacggtttgttgggaagaaatggggctggaaagactactattatgaaaatggtactgggtcttatctccatttcatccggggaagtggaagcctttggagaaaagctgcagggaaacgaaaacaatatttataaacgtataggttctattatcgagacacctagtttttattcttacctgacgggaacggagaatttagagatatttgcccggctgcggggaacaatcaaaaaagatgctgtaaaaagcgcgttggaagttacagggcttccctatcaagacaagaagccattttcatcatattcgttaggcatgaaacaacgattaggaattgccaacgccatattgaatgatcccgagctactgatattggatgaacctacaaatggccttgatccggttggcatagttgaaatcagaaagtttttgcaaaatttgtgccatgagcaggggaagaccattattatttccagtcatatcttatctgaaattgccttgcttgcagacgatattgggataatacacgggggccatttagtaaaagaaatttctatgaaagaattagaagaaaagaataagaagtatattgaaattaaagtagattctgttccaaaagcaacgcagctgttggaaaacctgttaaactgtaataattatgcagtcaccgataaaaactgtgttgagatctatgaggatacgttagatccagtatctatagcaaattgccttgttacccacggggtaggcttatcatccctgtattttaaacacgaaacattagaagattattttaccgcattgactggaggtgccaaatttgaataatgtgtttctgacagaaatattaaaattaaagaaaaacaaaatggcccttataggttttgcgtcgacgatttccatacctattctgctggttttgaaatcccttctgattgataaatctaagattggttatcaagagtggctgcagacagtttctatgctggtaaacatcattctgccaattatgagcggcttctttattacacaatccatgcagaaggaatatggagaaaagacaattataaatattataaccgctcctgtaaatagaaaaaattttgtgttgagtaaaattgctgtatggttttgctggtatctgtcagtaatgatttttacagaatgtattactatagcaggttcactgtgcttattccgttcacaggttacaataactacggtttcctataccgtacggctgctaacgcaaataggtatcttaagctttattgcatttctgcctgttatctggtttgccgtcagacagcggactttgttttatccggcgatgttatgcactttgatttttgttttgctgcagtccgttggctctcaagtctcagaagaattgcttcccgcggctagttttgtaccgtggctggcgatacagatatctgctatgctgccggcggacagccaatatttatatatctgcattatttcagttctttgctcaggcttgcttggcagtgtattagctgtccgggaatttaaaaagcaggacttgtaacgcggtgatatgtgtgttgtattaaaaagaactataaaagggatgctgtcaggttacgtgacagcatcccttttatagttcaaatgttacctgatctcaggcttgccggaaccactcttctttaagttcttctgggcagtggagagcatcagcttaatccggttaagctgatttacctcgctggctccggggtcgtaatcaatggctacgatgtttgcctgggggtactccttccgcacggctttgatgactccttttcccacaatgtgattgggcagacagccaaagggctgggtgcagaccacatttggggtaccgttatgtatcagttccaggatctctccggttaagaaccagccttcgccggtctgatttcctacggatacaatggaagaagccatttttgccaattgggagatatccgcggagggagtaaagtgtacactttgggcaaattcctcattggcggcttttcgaatccagttaatcgccttgattcccaggttgcccagggttgccgaggatttcttaaagcccaggtatctggacttgaaattcaggttgtagaagcagtagcacataaaatcaattaagtccgggcataccgcttcggcgccttcccgttccagaagctcggccaggtggttgttggccgctggaaggaattttaccaggatttcgcctacaatgcctactcttggtttcacttcatcggtaatggaaagactgtcaaattcacgaatcatcttccggcagagctttttaaagcccccgattgttacatgcttttgacctacaaaggcaatgcattccttttccagcttccggtgcagttcgttggcagagccgggaaccttttcataaggcctcatccggtaaaggcatttcatcagaatatcaccgaagactgccgcgaaggcaaggcggcttgccagcctggctgtgattttaaagccgggattgctttccagtccgcttagattaatggatatgaccgggatataggaaagccctgccttttccagtgcccttcggataaatccgatgtagttggaggctctgcagccgcctccggtctgggacataatgatagcaattctgtgagtgtcgtatttgccggacagcagcgcctgcataatctgccccactaccattaaagatgggtagcaggcatcgttattcacatatttcagacctacatccacagcctctttattatcattgggcaatacctccaaatggtatccgctggcattaaaagctgcctccaggatggaaaaatgaatgggtgacatctgagggcagagtatggtgtagttttgccgcatctcctgtgtaaatggtatcttttcaatggaagaaggcacaatagtccttgacattttctgttcttctcttacccggatcgctgcgatcagtgagcggatacggattctggccgctcccagattgttgacttcatcgattttcaggcaggtatatatcttgccgctgtgtgccagaatctcgtaaacctcatctgtggtgaccgcgtccagaccgcatccaaaggaattcagctgaatgagatccagattctctgtagtcttcacataattggcggcggcatacagccgggtgtggtacatccattgatcatttacccgcagaggacgttcaatgggagccaggtgggagatggaatcctcagtcagcactgcgattccataggagttaatcagatccggtatcccgtgatgaatctccgggtcaatgtggtaaggccgtccggccagcacaatgcctcttctgccagtctcctttaggtactccagcgtttcttcacccttccgctttatatcctccctgctgtcagccatctccttccaccctttggcggcggcggctctaacttcactttccgggatgtcagggaattcttctatcagacgcttggtcagaacctcctcactggtgaatgccataaacggattgcgaaatacaatagagtcatcctgaagctcgtcaatgttatttttaatattctctgcataagaagttacaatggggcagttatagtggttaatggaatcctggaattcttttctctcataaggaatacatggatagaagataaacttaacgccctgcttaatcagccaggttacatgtccatgggctaatttggccggataacactccgattcgctggggatcgattcaattcccagttcataaatctttctggtagaggtgggagagagtacaacctggtatttcagctctgtgaaaaaggtatgccagaaaggatagttttcaaacatatttaaaactctgggaattcccacctgtccccgcacagctttatccaatgtaagagactcataagaaaagagcttcttatatttgtattcaaagagattgggaatgtgctctttgtttttttctttgcctatgccccgttcgcagcggttaccagtaacaaactgacgtcctccggagaatttgttaatggtgaggcggcagtgatttgtgcagcctttgcagttggccatagaggtggagaactgcagcgtatttattttttcaatgggcagcatagtagtctcttttgagacatcataccgttcccgggcaatcagggcagcaccgaaggctcccatgattcctgcaatatccgggcgtatggcttcacagtccgcaattttttcgaaactgcgcagtacagcgtcgttgtaaaaagttcctccctggacaacaatatgatcacccagttctttcgcatcagatacctttattactttgtaaagcgcgttttttatgacagaataggccagaccagcagagatgtctgatacctcagccccttccttttgtgcctgcttaacctttgaattcataaatacagtgcaccgcgtacccaggtcaatgggatgtttggcgaaaagtgcggttttggcaaaatcctgtacactgtagttcagggaattggcaaaggtctcaataaaagaaccgcagccggaagagcaggcctcgttgagctgtacgctgtcaacggtattgtttttgattttaatacacttcatatcctgaccgccgatgtccaggatacagtctacctcagggtcaaagaaggcggcggcataataatgggataccgtttccacttccccctcatccagcattagtgctgcctttatgagggcctccccgtatcctgtggaacaggagtacgcaatggtagcgctggaggggagctgagtatagatttctttaattgctcttatggtagtagccagagggcttccgttgttgctgctgtaaaaggaatagagcagagaaccatcctcccctaccagtgcggctttggtggtagttgagccggcgtcaatccccaggtagcagtttccctcataggaagcgagatccgcagatgctacattgtacgcactctgacgctcattaaagatgtcgtattcttcctgagaggcaaaaagaggctccatccggtcaacttcgaattccattttgatagaagaagccagacggtctctcatgccaaggagagaaacagtatccgcatcttcttttgcgttcagggcggaaccgatggcggcaaaaagatgagaatttgccgggataatggtatgcgcatcgtccagtttcagagtacggataaatgcctcccgaagctcagacaggaaatgcagcggacctcccagaaaggccacatggccccgaatgggctttccgcaggccagtccgctgatggtctggttaaccactgcctggaaaatagaggcggagagatcctccttggtggccccttcgttgatgagaggctgaatatctgtcttggcaaaaacaccgcagcgggcggcgatggagtatagtgctttgtaatccctggcgtactcattcagacccacggcgtctgtctgaagcagggaggccatctggtcaataaaagagcctgtcccgccggcacagattccgttcatacgctgctctatatttcctttttcaaaatatataatcttagcgtcttcgccccccagttctatggctacatcagtttggggcgccagagcctgcagggaagatgagaccgcaatgacttcctggacaaatggaacccccagatgttttgccagggtaagtccgccggaacctgtgatcacaggtgcaagctgaagttcccccagtttttcataggcatgacccagaaggtgtgccagggtctcctgaatattcgcatagtggcgctcatactcagaaaaaacgatctcctgctcctcatttaaaattgctatttttacggtagtagagccaatgtctatacctaatgtatatgtaatttgtttcataaccttgttcacaggtcgccctgtgacctcctcactgtgaaattaaataaccatttctttcctattatatgcagttttatggggtaacaaaactacataacattatacgacaataaaggttaaattacaaataaaaatgttgtgaagaagttgtgaagataaattctcttgaaattcgtaaggcttttggatatacttagactacatgctgataaaaaggaagagtactatgtataagatattaaaaaaagacggaaaagcaaaaagagctgaatttactactgttcacggcaccattcagactccggtttttatgaatgtgggaacagcagctgccataaaaggtgcggtagccaccacagatctgaaagagattggaacccaggtagaactttccaatacgtaccaccttcacgtgagaccgggagatgaggtggtgaaaaagatgggaggcctccataagtttatgaactgggacaggcctattctcacggattcgggaggattccaggtgttttccctggcagggcttagaaaaatcaaagaagagggagtgtattttcaatcccatatagatggaagaaagatttttatggggcctgaggaaagtatgcagattcaatccaacctggcctccaccattgccatggcttttgacgagtgcccttcaagtgtggcttccagagaatacgtacaggcgtctgtggacaggactacccgctggctttggcgctgcagggcagagatggaacgtctgaatcaaaaagaagataccataaacagacaccagcttttattcgggatcaatcagggggctgtctacgaggacattcggattgcgcatgcaagagagattgcggacatggatttggacggctatgccgtaggcggtcttgctgtaggggaatctcatgaggaaatgtaccgcatcttggacgcagtagtaccctgtcttccggaggagaaaccaacctatcttatgggggtggggacgccggctaacattttagaagcagtggatcggggcgtagacttttttgactgcgtgtatcccaccagaaatggccgccatggacatgtatacacgaatgtgggaaaactgaatttatttaatgcaaaattcgagttggattccagacccattgaggaggggtgccagtgcccggcctgccgtaattacagcagggcttatatccggcatctgctgaaggcaaaagagatgctgggaatgcgtctctgtgtgctccacaacctctatttttataataaaatgatggaagagatcagagaggctatagaacagggaacttatcaggagtacaagaaacaaaagctggaaggatttctctgacagcggggggttgcaaaagaagcagagatacagtataatagcaattgcaaaagagcttatgcggatcatatttttatgtggccgcaaagctctttttttgattgctgcattatattaaaggaggataacatgttgaacagagcgaaaagaatcataaaggaaattggaatggaactcatcggcagcgcgctgattgcagtgggactctataattttgcggttacgtcagaattccccatgacaggcttctccggtatttctctgatactcaaccggctgtttcacctgcccataggccttacgatcatcgttttaaatattcccgttgccctgctctgctacaggcttctgggaaggggcttttttttgcggtctctccgctgtattgttatatcctctgtcatgatagactacgtggcgcctctgcttccggtatatacggggagccggatgctctcggcaatctgcaccggggtacttggagggctggggtatgccctgatctacatgcagaattcatccaccgggggcaccgattttgtgattatggcagtaaaggctgtgaaaccatatttgtcactgggcaagattgcttttttgtcggatattgggattattgttcttggaggacttatttttagagacgttgacggaattatctatggaatgatcatcaactttttgtttgccgtggcggtcgacaaagtggtctacggggtaaatgccggaaagatggcgctgatagtcacagattacggaaaaaaagtgacagatgccatcgacgagtgctgcggaaggggaagcacgattctcccggcttcggggggatacaaacaaggaaaaaagcaggtagtgatgtgtgcctgcaacaataaacagatgtattttgttcagcaaaaagtaaaggaagtggatgaaaatgcgtttaccattatattggaatccaatgaagtccacggggaaggattccggatgtttaacatcggggaacagggatagagccggatatggctcattttcccattaaaattacattaaattgtcaaaaagccttgaagaaatactgttttttgtgtattattgtactaatgtctgaaatgcaataaacaaaacaggaggaatggattatgttattaacagccagtgcatcagcaggcggttcatggcttaccatgttattgccattggtgcttttctttgctcttatgtattttatgatcatgagaccgcagaagaaggaacagcagagagtgaaagcgatgttatcatctatggaggtaggcgatagtgtagttactaccagcggattctatggagtcatcattgatattacagatgaggatgttatacttgagttcggtaacaacaaaaattgtcgtattcccatgagaaaagctgcgattgcagaagttgaaaaggcagaggtagctgaaaattaagagagaaagatgttgtccggggacagcatctttttattttattgcatactttacgcccggtgctgtactttattcttgaaaagtggcgaaaaatgaattaatatatatagtattataggctatccccaaagggcaccccttaactaatgctccggggcatgcggcgcatgccgtgtgatagcgtattcaggctgatgacatgacagaaagggagagattatgaattataaaattgcattgatccggggagatggtatcggaccggagattgtacgggaagcaaaaaaagtgttggacaaagtatgtgatatctacggacataccttttcatatgaagaagtcctgttaggcggggcttctattgacgttcacggggtacccctgacagaggaagcggtggagactgccagaagctgtgacgcagtccttatgggctctatcggaggagacgccaggacttctccctggtatcagttagaaccgtccaaaagaccggaagcagggcttcttgccataagaaagcagttgaatctgtttgcgaatctgcggccggcgtatttgtatgaagaattaaaggatgcctgcccgctgaaggaagacattatcggtgaaggctttgacatgatgattatgagggagctgaccggaggtctgtatttcggagagagaaggaccactgtggaagacggcgtggaaaccgctgttgatactcttacatacaatgaaaaagagatccggcgcattgccgtacgggcgtttgacattgccatgaaacgacggaaaaaggttaccagtgtggataaggccaatgtactggattcctccagactctggagaaaggtagtggaggaagtggcaaaggattatccggaagttgctctggagcatatgctggtagataattgtgctatgcagctggtgcataatccgggacaattcgatgtgattctcacagagaatatgtttggagatattttatctgatgaagcaagtatggtaaccgggtccatcggcatgctgtcttctgcaagtcttaatgagacaaagttcggactctatgagccaagtcacggatctgccccggatattgcgggcagggatctggctaacccaattgcgactatactctcggcggcaatgctgctgcgctattcccttgatctggataaggaagcggatgccgtggaagcggcagtacagaaagtgctgaaggacggataccgtacgggcgatattatggcagatggtatggaacaggtaggcacggagcggatgggagatttgattgcggcagagatccggtaagaagataagaatctgccatacggcaacccctttttgggggagagaattataagaatcagaaagggaaaaaattatgagaagtgatgcagtgacaaagggggtacagcaggcaccccacaggtctttatttaacgcacttggtctgaccagggaagagatggagcgcccgttgattggtattgtgagttcttacaatgagattgtaccgggacacatgaatctggataaaattgtagaagctgtcaaaatgggagtggccatggcaggcgggacacccagagtctttccggcgattgctgtgtgcgacggaattgccatgggacacgtgggaatgaagtattccctggtgaccagagatttaatctgtgattccacagaggcaatggctatagcccatcagtttgacgccctggtaatggtgccgaactgtgataaaaatgttccggggcttttgatggcagcggcaagacttaatatccccacagtgttcgtcagcggcggacctatgctggcagggcatatacacggttctaagaccagtctgtccagtatgtttgaggctgttggtgcatacagcgccaataaaatgaccggaaaagaagtagaagaattcgagaggaaggcttgtcctacctgcggatcctgctccgggatgtatacggcaaacagcatgaactgtctcacagaggtgctgggcatgggacttgggggcaacggcacgatcccggcagtctattcggagagactgcgtctggccaagcacgcaggcatgaaggtgatggagatgctggaaaaagatatccgtcccagagacattatgacaaaagatgcatttatgaatgcgctcaccgtagatatggccctgggctgctctaccaacagtatgcttcatctgccggccattgctcacgaggcaggggtggagctgagcccgtctactgccaacgagatcagcgccaaaacacctaatctttgccacctggcaccggccggacatacatatattgaggagctgaatgaggcaggcggcgtatatgcagtgatgaatgaattgaataaaaagggcctgctgcatacagattgtatgacggtaaccggacatacagtgggagaaaatattaaggactgtgtgaataagaaccctgatgtcattcgtccaattgacaatccctacagtgaaacaggaggaattgctgttttaaagggcaatctggcgccggatactgctgtggtaaagcgttccgcagtagttcctgagatgatggttcatgagggacctgcccgggtatttgactgtgaggaggatgcctcggaggcaattctctccggcaaaatagctgcaggggatgttgtggttatccgctatgagggcccaaaagggggaccgggtatgagagagatgctcaatcctacctcccagattgccgggatgggactgggatcatcagttgccctgattacagacggacgtttcagcggcgcatccagaggtgcgtccattggccacgtatcaccggaggcagctgtgggcggacctatcgcactggtggaagaaggcgatattataaaaatcaatattcccgagaattctttggaactgttggtatcaccggaagaaatggaagagagaagaaagaattggaaacccagagagcctaagattacaaccggctatctggcacgctatgcatctatggttaccagcggcagccggggtgcgatattagaaataccgaaacagtaaaggaggaagcggagtatgcagctgacaggttctgagattgtaattgagtgtttaaaggaacaaggggtagatactgtatttgggtatccgggaggaaccattttaaatgtatatgatgagttatacaggcatagggaggagattcatcacgtgcttacctcccacgaacagggggcggcccacgccgcggacgggtatgccagagcaacgggaaaagtaggtgtctgtatggcaacctcaggtccgggtgccacgaacctggtaacgggaatcgctacggcctatatggattccattcctgtagtggctattacagctaatgttggagtacctcttctagggagagacagctttcaggaaattgacattgcaggcgttgtgatgcctattaccaaatacagctttatcgtaaaggatgtaacaaaactggcagatacgctccgccgtgcatttaccattgcaaaaagcggacggcccggcccggtactggtggatattacaaaagatgtaactgcaaataaagcagagtacacctatgagaaacctctggagatacagccctttacagctaaaatcacagaggaggatctggagagggcggtggaactgattcagaatgctcacaagccatatatatttgtgggcggcggtgcgataagttccggcgcatccgaagaagtaagagtgctggcaagaaagattcaggcaccggttaccgataccctgatgggaaaaggggcgtttccgggagaagaccctctctatacaggtatgctgggcatgcatggaaccaaaacctctaacctcggcgtaacggaatgtgatttgctcattaccataggcgccaggttcagtgaccgcgttacaggcaatgccaagaattttgcacgaaacgctaaaattcttcagatcgatgttgatgctgctgagatcaataaaaacgtaattgtggatgcctctgtcataggagatgtgaaagaagtgctgaaacgcctcaatgagagggtggcgccgaaagatcacacctactggctgacccatatcaaagatatgaaagaaaagtatcctttaaaatataataaaaacggactcagcgggccgtttgttatagaagaaatctatcgggtgaccaacggggatgctgtcattgtaactgaagtggggcagcaccagatgtgggcagctcagtactataagtataaggagcccaggacatttttgacgtcagggggactggggactatgggatacggcctcggcgcatctatcggcgccaagattgcgaaaccggagaagacagtaatcaatatcgcaggggacggctgtttccgtatgaacatgaatgagattgccacagcagttcgaaacgaacttcctctcatacaggttgtgattaataatcatgtgcttggaatggtccgccagtggcagactctgttctacggagagcggtactcccataccatattaaatgataaggttgattttgtgaagttcgcagagtccatgggcgcagtgggaatccgtgtgacaaagcctgaggaagttgagcccgctctgaaaaaagccatagagttaaacaccacagtcgtgattgagtgcatcgttgactgcgacgataaagtattccctatggtatcaccgggagcgaatattgaggaggcatttgacgaggaagacttaaatcagagataggatgtctttccaaagaagacaaatgtttttattgacaaaaatatgtcaaagaagtagaatgttcattgatgtgatatatgaaagaaaagaatgaacattaggaggaagagtaaagtgggaagagtctataacttttcagcagggcctgctgtcctgccggaagaggtattaaaagaagcagcagaagaaatgttagattataaaggaaccggtatgtcagtgatggagatgagccaccgctccaaggcttttcaggaaattctggatgatgcggaggcggatctgagagaactgttacatattccggataactataaagtcctgtttctgcagggcggtgcccatcagcagtttgctatgattccaatgaatctgatgaaacataaggtggctgattatattgttaccggacagtgggcgaaaagagcataccaggaagcacagaagtatggaaaggcgaacaagattgcttcttcagaggataaaactttttcctatattccggactgctcggatctgcctgtcagcgatgatgcagattatgtgtatatctgtgagaacaacactatttacggcacaaaattcaagacactgccgaatacgaaaggtaagcttctggttgcggatgtctcctcctgctttttatctgagcctatggatgtaagcaaatatggggttatctacggaggggtgcagaagaacgtaggccctgccggtatggtaattacaattatccgggaagatctgattacggaggatgtacttccggggactcccaccatgcttacttataagacacatgccgacgcaggatctctgtataataccccgaactgctactgtatctatatgtgcgggaaagtatttaagtggctgaaaaaacagggcggtctggaggccatgaaacagtataatgagaaaaaggcgaaaatcctttacgatttcctggatggaagtgcgttgtttcaggggacagtggtgcccaaggatcgttcccttatgaatgtaccttttgtcaccggaaatgatgaactggatgccaggttcataaaagaggccgcggcccagggctttgttaacctgaaaggccatcggagtgtgggcggtatgcgcgccagcatttacaatgcaatgcccatagaaggtgtggaaaagctggttgaatttatgaagaaatttgaagaggagaaccgttaaaatgtataagtatcattgcttaaatcctatctctgatgcgggaatcagcaggttttctgaggattatcaggaaacagcattggaagattcggatgtgattctggtacgaagcgctaacatgcatgaaatgcagctgccggataatataaaggcaattgcgagagcaggggctggtgttaataatatccctctggatgtatgcacaaagaagggggtcgtagtattcaataccccgggtgccaatgccaatggagtaaaggagatggtaattgccggaatgcttctggcatcccgtgatatcgtaggcggtattgagtgggtggaaaagcagggcaatgcttctgacatcggaaaacttgccgagaaacagaaaaaacagtttgcgggctgtgaaatcagcggtaaaaaattgggtatcatagggctgggcgccatcggcgtactggttgccaacgcagcaacccatctggggatggaggtgtatggatatgatccttatatctcagtggacgccgcctggaacttgtccaggaccattcaccacattaatgatctggaaacgatttacagggagtgtgattatatcaccattcatgtacctctgacggacggtaccagaaagatgattaacgaggaggccatccgccacatgaaagaaggggtggtgctcttaaactttgcaagggatcttttggtagacgaagaggtgctggtagaggcactaaaggaaggaaaggtcaagaaatatgtgaccgactttgcgaatcccacagtggcaggaacacagggaactctggtgacgccgcatctgggggcctccacagaggagtctgaggataactgtgccagaatggccgttcaggaactcagagattacctggagcatgggaatattaagaattcagtgaactacccgaactgtgacggaggcatctgtgtggatgccggaagaattacgctgaaccataagaatatccccaatatgatcagtcagtttgccaaggttctgggcgatgcgggagtgaatatttcggatatgacaaataagagtaagggcgattatgcctatacaatgattgacgtttccacttctatccctgaaagtgttgtggaatcattaagagaaatcgaagatgtctataaggtccgcattgtaaaaggcgaataaattacctatgggggtaccgcaggggcggtattcccatttttgccaataaaaaagaggtagaaatgaaaaagaaaagttggaatccctttcaaaaagggtggaagagaatgaaaaatcttcagaagatataccgttccgttaagaggcataaaaagaaatacagaaaagcagtgaatgggatctgtgaagtgattttgcataagattgagaattaaaggatgaaaaggagaaccaatatggctgatattaaagcttttcggggcataaggccgaggccggatctggcggataggattgctgctctgccttatgatgtgtacaacagaaaagaggcactggcagaagtggaaaaagaacccctttcctttctgaaaattgaccgggcggagacgcagtttccagatacagtaggaacctatgaggattgtgtctacgagaaagccaaagagaccctctgggatatgaaggcaaagggagcatttatccaggatgaaacaccctgctgttacttgtacgaactaactatgaatgggcggagccagacggggatcgtggcctgcgcgtccattgatgattatcacagtcaggtaattaaaaagcatgagaatacaagggaagaaaaggagctggacagaatccgccacgtagatacctgcaatgcccagaccggtcctatttttctggcctatcgttcccgcggggaggtaaccgctctggtcgcccaggcaaagcagcaaaagcccgtgtatgactttatttctccggatggcatcggacatcgtgtgtgggtaattgaagacagagagcagatagaacagttggagagtgcttttgggaagattcaggaaatctacatagctgacgggcatcacagagcggcatcagcggttaaagtgggagaaaagaggcgtgcagaacatccgggctatacggggaaggaagagtttaactattttctggctgttttgtttccggatgaggaactgtctatcctggattacaaccgggtaataaaagatttaaacggcaatacaccctgtgagcttctggaaaaaattcagggagacttttctgtggagaaaagagaagaaccagtacgccccacaaaaaaaggagaatttggcatgtatctggagggagcctggtatcttctcagagttaaaccggaagtagtctccgaagatcccgtgaaaggtttggatgtatctattctccaggacaggctccttcagccgatcctgggaatccagaacccgaaaacagacgccagaattgatttcgtgggcggaatccggggattaaaggaactggagagaagggttgcagaagactgcatggcagccttttctctgtaccctacttccataggagagctttttgctgtggcagacgcgggaaggctgatgcctccaaaatcaacctggtttgagccaaagctgcgcagcggattgtttatacacgaaatataatagaaagattgggaggatttacgtatggagagcagagttgagaaagcagtggaaaagcatcgccagggatataactgtgcccaggcagttgcctgtacctattgtgatttggtcggtgtggacgaatctaccatgtttaagatgatcgagggcttcggggccggcatggggggaatgcagagtacctgcggagcagtatcgggcgtaatagcccttgctggcatgaagaacagcaagggatgcggcgatacttctacaaaggggaagacgtacaagctgtcaaaggaaatcgcaaaagaattttcagagattaaccagtcaacggtatgtaaagtgctaaaaggggtggagacaaagaaactgcttagaagctgtgacggatgcgtggaggacgctgccaggattgctgagaaggtattgtttcaggaagaagagtaattatcatcaaaaaaggaaccgatgttcttacggacattggttccttttttgttacatagatttcagatcctgaatcattttaatcagtgagcttccgtagttttgtccggctgcccatcctccgccgtaggggttgtcgggaatcccgagccattctacgtagggggaggtgtttcttgttacatagttaaaccgggggtccacgcagggctgattcagtgcagcggtacttgcatacgcctttaaatgctgtatctgtgcccgaagaccggttcgcacgtcagagaaggcaactcccggtacacctcctccggtggcgccgaggccggcaaaattatactggccaatagacacatcgccgccgtagttgagccatcctgtttccttcataatctgagtgaaaacaacttcagcctttatattctctgctgctgcttcctcgtaaatgatttcacagaaggtctcaatatccggagcccctccatttgcaaggactgcggaagggtaagaggcggcgttagccttaaaatagttcgccatctgatccacggagacggaggtagcgccctcgatgatatacattccgctggctgcatccacattgctctcataggatgtaacctcctgactgcacacacctgcagtgctgaacgtatagttactgccgtcaattacttgttctccggtgaccataacgccatcctccccgaggtagtaccgtttgccatccagcgtcagccatccagtcgtcattctgccggtttcatcaaagaaatactgcttgttatccactttcagccatcctttgatgggagagccattcaggttattgtaataccagtaaccgtcatggaagctccatcctccggaggtattaatttcaggattctcgttccaggcaccgtcggcatccagacagtaccagctattgtcgataaactgccacccggttgccattgagccgtttcctggggtgaagtaataccaggtatcgtctatgagagtccatccttcggccatagctccggtgtcctccagataataccatatctcattaatcttttgccatcccgtttttttctcatcgtttatgtagtagtaccaagagtccccttcttttgtccagccgttagttccgggagctgtctcagtgccgctatccggcatcagtggtgagggaagggacacctgataaggggataacagggtctgtgccggggattccgcccctaatacagagacaggggcggccaataccatagaggccgtcagcaaatggcatagatagcgcttttttgttccattcattcaaatactcctttgtaatgtaaccgatgattctttacttgcttgtcactttactattatataggatgggagtctgaatgacaacctggagttacatagattttaatgttgtaatcattccaatgagactgctgccgtaattttttcctgcggcccagccccctccgaaggggttgtccgggattcccagccactctacaaaaggagaggagtacctggtaacataggtaaaacgggggtccacacaggtctgtaccaggttatctctggaagcgtaggccttcaggtgctgtacctgagccctgataccggtgcgcacatcggcaaaactcaagccggggactccccctccggttgccccaaggccggcaaaattaaactgctcaatctttacgtctcctccgtattgaagccatccggtttccttcattgcctgcgtgaaggcaacttctgctttgacaccttccgtctggcactcttccaggaaaatctgacagaaggttttgatgtcaggagcgccgccctttgccagtacttctgcggggtaagcctgcttgctggtggcaaaatacttaaccatctgatctgcggttacagagcttgtccccataattttgtatccgggatattcatcaatgttgcccagactctcgccggactgggtaaaggtataagtgacaccgtctacggtatagtagcatccggagaccatggcgccgctgcttagaagatagtaggtctttccgcctacagtctgccatccggtgagcatcttgccggtactgtccatataataccatttaccgccgtttaatagccaccctgtatgataaccgttggctcctatgtaataccagttcccattttcaagctgccagccctgagccggatgctcaatccatacgccgctgttgtcgaagaaataggacttgcccccgattttctgccatccggtaagcatggccccggaggaattcatgtagtaccatttaccgccaatcttctgccatccggtgagcatggcaccgctgctgtcggagtagtaccaggtattgcctaccagataccacccggttttcatagctccattgcccggagtgagatagtaccaggtctttccaagtttgagccaaccctccgccatggcgccgctgctgttgagatagtaccatttgccgccgatcttctgccatccggtgagcatggcgccgctgctgtcggagtagtaccaggtattgcctaccagataccatccggttttcatagctccgttgcccggagtgaggtagtaccaggtctttccaagcttgagccaaccctccgccatggcgccgctgctgttgagatagtaccatttgccgccaatcttctgccatccggtcagagctgctccgcttgcattaaagtaataccatttgccgtcaatgagattccagtttaccgccatgactccggtttccgggttcaggtagtaccgggttttccccagggttatccagcctttcgcccgggcgccgctgctgttgaggtaataccacttgccgtccaggagaagccaaccggtctgcatagcgccgctgccgttaaaatagtaccattggctgcctattttttgccagccgtctaccatggctccgtttccaggggtaagataataccaggtgtttccaagttttttccagccctctgccatggcgccgctgctctccaggtaataccatttgccggagataaactgccaaccggtctgcatgactccgctgctgttgaggtaataccatttactaccgagatactgccagccagtgagctttttgccgtctttataataataccatttcccattaatatatttccatttggtcagatttttattgggatgagaggtactctccagattgaaatactgggcaattcccttggcgtctgcctgtcccagctttttcagatcctcttcactgtccagaaacttcttgtcctctgctccgcatataaaagcatgttctacgataacgccaggaagtccctgctccatacagttgcggataattccgtagtagtcagctaaactgccgtccggatactttgtgccgctagcagaatctttgtattttagtccccggttgtaaaggccgagggcaacaagattgtccaaaatgttggttgcaagctgattggcatctacggctacatcatggttataccgtccggttgtggggaccaggatttccacaccatgtgctttttccgaatccgcagagttaatatgcaggctcacaaaaatatcggcatttttttcaacgccgatggccacccgctctcctaagtcgggaagataggtgtctccggttcttgtcatatacacctgaatctccggatatgcggcaagggcttcttttacataattagcaatcttcagggtaagctgtgattctacgaatttggtaccgtcgctgaaggtgtattccgcgccgccgtcctttccgccgtgtcccggatccaatactacagtaaaggttcctgctttagtgtccgctttcggtgcggaaagagcagatctggacatggaagcgggagcggcttcactttgaagcacctcggaaatgtcggaagctgtaagtccgtcctccccttcttttgtgactactgtttgattcacataatccaattcttcctctgagaggctctctgtgtctgtctgcttggctgtatccccaatgatttccgcggcttgttcctcgtcaatactgagggtattcatttcttcctccggctgcagtccggtctctatatcctgaccgcctacagtggtaacgatagaaagaaaggttcgggtaacaccttcccctggaagatccagcaggaaagcggcataattttcaacaatttcctctgcttctgcagtatgtatctccccatccccatcctgataggagaggactgctttttccattacagtagaagaatcccccatctcaagaatgacggattggtgcgtatcgtcttcctgggtcaaaagcagctggcagtccagagaaagggaatccctgctgtcgttgtctggttgtgtatcctgtgtgggttcctcctcaggaaggctgtcacgggcctgactgctggcgtaagccggcgtccaggcagtgagcagcataactgcagtcagaacatagcacaggagtttctttcggatgtttttcatttgtctttctcctttgcttttttgcaacgtaaaactttgttactaaaatgttaatgaatcattacatattatagtatatggccggacagattgcaatggaggaatagaaaatgacctctgaatttaagaaaagtttaatctgaatttataagccatccattgcaagggtcagaaaaatatgttaccttacaaatatagtttatctgttagttgctataaataatgtattgggagaatgtatgaaatggaaaaattagaactgaagtaccttcaatgtctggcagagctttacccgtcaatcgctaaagcctctacagaaatcattaatctgcagtctatactgaatctgcctaaggccacagaacattttttgaccgacattcacggggaatacgaagccttttcccacgtgctgaagaatggttcgggagcagtgagaaggaagatcaatgaggtgttcggacacactctggacgaaagagagaagaaatctctggcaaccttaatctattatccaaaagaaaagatggaggtagtgaaaaagagcagggagaacatggaagactggtatatgattaccctgtaccgtctcatcgaagtctgcaaacgggtagcctccaaatatacccgatcaaaggtaagaaaggctctgccggaagattttgcctatgtcattgaagaactgattacggaaaaaccggatctggtggacaaagaagcttactatgatgagatcgtccatacgattattgaaattgggagagcggaagtatttattatagccctttctgagctgattcagcgtctggtagtagatcatcttcatatcctgggggatatctatgacagagggcctggtccccagcacattatggataagctgacaagctaccactctctggatattcagtggggaaaccatgatattctctggatgggagctgcggtgggccagcgttcctgcattgccaccgtgatacgcatctgtgccaggtatggcaatctggacattctggaagacggatacggcattaacctgcttccccttgcaacctttgcccttgcaacttataaaaatgatccctgcgagtgctttaaaattaaagggacagatgtgtataatcctgcagagacagaattgaatatgaagatgcacaaggccatatccatcattcagtttaaactggagggtcagcttttgacaaggcgtaaggaatataagatgagcgaccggcggcttctggacaagatagattatgaagccgggacaatggaactggacgggaagacctatgcattaatcgacaaaaatttcccaaccatagatcccaagaagccctttgaacttacagaagaagaaacagctatcatggagcgtctggtgacagcgttcaccgactgtgaaaagcttcagcagcacatgatgctgctcctgaataagggaggtctgtacaaaacattcaatgggaatctgctgtatcacggatgcgttcctctgaacgatgacggaagtctcatgaccgtagagatatacggaaaaaaatataagggaaaagcgctgtatgatgtgctggatacctatgtgagaaaggccttttttgccctcaaccctgtggaaagagagaagggcaaggatattttgtggtatatctggtcaggtcccggttctccgctgtttggaaaaagcaagatggcaaccctggaacggtatttcctgaaagagccggaaacccacaaggaagtgaagaatgcctactatggtatgctggaaaatgatacggtagtaaacagtatccttcaggaattcggactggacccggagcacggacatattatcaacggccatgtaccggtgcatcacatgtcaggggaaagccctgtcaagtgcaacgggaaattactggtgatagacggtggattttcaaaggcttaccaaaaagaaaccggaattgccggctatacccttatctttaactccttcggactcattcttgccgctcatgagcccttcacatccgcagaaaatgctatagcccaggagacagatatcgtatcagacagcatactggtaaaacgagtggcaaagcgaatggtggttggagatacagataacgggaaagccctgcaagagagaattgatgagttaaaacagcttctggatgcttacagaagcggcctgataaaagaaaagtaaagagtaaaaaaaggggacgtgttctttctaaaaggaacacgtcccctcagactgtagacaaagtccgaggacaagtgcctcggattttcttcgccattgagccagaaaagtcagcacttacaagactttgaggctcttttttggtataatagatgtatcaaatacaggcggtgagatgcttatgatgacacagaatgcggataaaaaaagagaacagattcagttgttttgcatggatgacatggttccacaggaccatctgctgcggatcatcgacaaagcaatcgactggtccttcatttatgaactggtagaagaaaaatacagtcaggacaacggacgccccagtatggaccccgtcatgctgatcaagattcctttcatccaatatctttatggcattaaaagcatgcgccagacggtaaaagagattgaggtaaatgtcgcctaccgctggttcctcgggctggatatgctggataaagtgccgcatttttcaacctttggaaagaactatacgagacgctttaaagacaccgacctctttgaacagatattcgagcatatcctttctgaatgctacaaatttaagctggtagaccctactgaagtttttgtggatgccacccatgtaaaagccagagcaaacaataaaaagatgcagaagcgtattgctcatgatgaggcattattttttgaagatctgctgaaacaggaaatcaatgaagaccgtgaagcacacgggaaacgtccgctgaaagaaaaagaggatgacagcaatacaccatccggtggagccggcggcaaagaagaaaagacagtgaaagcaagcacttctgatccggaaagcggatggttccgcaaaggagaacataaacatgtatttgcttatgcagtacagaccgcatgtgataagaatggatggattctcagctatagcgttcatcccgggaacaatcatgacagcagaaccttcaagtccttatatgacaagataaaagggatcggaatagagacgctgataggcgatgcaggatataaaactcccggtatagcaaaacttttgatcgatcaaggagtcaaaccgctcctgccatacaaacgccccctgacaaaagagggtttcttcaagaaatacgagtacgtttatgatgagtattacgactgctatatctgtcccaacaatcaggtgctgacctatcgaacaaccaaccgtgagggatatcgggagtacaaaagctgtggaagtagctgtgcaggctgtgcctatcttgcaaaatgtacccaaagcaaagatcatgtaaagacggttatgcgccacatatgggaaccttacatggagatgtgtgaggagatccgccaaaccgtgggtatgaaagaattatattcccaaaggaaagaaaccatagaacgaatctttggaagtgcaaaggagaatcatggtttccgatatacacagatgtttggaaaagcccgaatggaaatgaaggtcgggcttacatttgcgtgcatgaatctgaaaaagctggccaggatgaaagagaaatgggggcttctagagggagaagcccattacacaaactttatttggaacgcaatttggttaataaaagaaaactggctctgggatacaaagcccaaaaccagtttgtctacagtctgcgtattttccataagggacagggcaggggggaatcggggacgtgttctttctagaaagaacacgtccccgattcccccctgccctgtcccttatggaaaatactgttgacagtccttgtctgatatcatataattcaattaaattaagtgcagactgcagaaaggaaactgaaaatggacgacgccgacggcgacgaagaccgaacaaattgtagagcaacggcaaatataaaaatcataccggacatagcattctggcagcaccctataaagtgctgaaggaaagttatgtccttatttagtgcaaaaaaagagaatattttgcaaaaaggagtttattttatgaagaaatttattgtaggaaaggattttgagtatgaacagtaacagcatttcactggtaattattgtaatctgtattattatgtcggcctacttttcggcaacggaaacagccttttcttctctgaatcgtatccgggtaaagaatatggcagacaaaggaaataaaagggcagagcttgttttaaaactggcaggtaattatgatggaatgctctcaaccatcctgattggcaacaatattgttaatatcgcctgtgcatcaattgctacggttttgtttgtaaagcttttgggtgaggacatgggcgccagtgtctcaactgtggcaactaccgttgttgtactcatttttggtgaggtttctcccaaaagtattgccaaagagtcgccagaaaagtttgctatgttttccgcaccttttttaaagggatttatggtagctctgacgccctttaattttttgttccgccagtggaaaaagttcctgtctaaactggtaaaaacttcagaggaccgctccattacggaggaagagctgctgactatagtggaggaggcagaacaggacggggggatcgggacccaggaaagtgatctgatccgcaatgccatagaatttacagaagttgaagccggagatatcctgactccccgtgtggatgtggtggctgtatccattgaagactccagagacagcattgcccgggcctttgccgacagcggattttccagactcccggtatacttggagaacattgatcagattgtaggaatcctgtatcagaaggacttttataattacgtatatcacacggatgagaagctggagaatattgttagaaggccgctctttataacgaagacaaagaaaatcaatattctgctaaaagagcttcaggcggcaaaatctcatatagccgtcgtgatagatgagtttggcggaacggtagggattgtaaccctggaagatattttggaagagctggtaggtgaaatctgggatgagcatgataaggtggttatggaaatagaaaaggaaggggagaacgtctatacggttctcggcagcactaacgcagaacatttttttgaggagctggacagagaggaagaattggaagtgaccacagtcagcggctgggttatggatcaattgggtaaaataccggaagagggagagcagtttcaatttgaaaatctgaaaatcactgtgctcaaaatgtcgggacgccgtgtagaaaagatacgggtagaagtcttgcctcagatagagcgggccgggtaaccggcccgtcctttttctacataattcacttaataacttgaatattttcccataataacatacaataatgagaaagactacgacacgagggagagaatcatgatctacaacacaatcttagatgcaatgggtaatactccgctgatccgtctgaaccatatgggggatcccaacggggcacagatactggtgaaattcgaaggattaaatgtaggcggctctattaaaaccagaaccgcttttcatatgatttcagcggctgaagaaaaaggactgcttcacaaggattccattattgtggaacctaccagcggcaatcagggaattgggctggcattaatcggagccgtgaagggataccggacggtgatcattatgccggattctgtgagtgaagagcgcaggaaactggtccagcactatggggcagaggtgaggctggtgcacgatgcaggtgatatcggagcgtgtattgaagaatgtctccagcaggcactgaacatggcacgggaagatcccaatgtatatgtgccccagcaatttgaaaacccggcaaatccatctgtacacagaaaatatacggcccgggagattttacaggatgcaggaggtcccattcacggattttgttccggaataggcaccggcggcaccatcacaggaatcggggaaattctgaaagagcagaatccggagatggaaatctgggcagtggagccggagaatgcggcaattcttgcaggaggcaatataggaacccatattcagatgggaatcggagacggtttgatcccggccatactgaaccagaaaatatatgaaaatatttatattgtaagtgacgaggaagccttacagaccgcaaaggatcttgcccgcctggaggggcttatgtgcgggatttccagcggaaccaatgtggcggcagccattgccctggcaagaaaactgggaaaaggaaagacagtggttacggtattgccggatacggcagagcgatatttcagtaccccactgtttgcgtagaaaagcggggcttgccattgtatgtatgacttgttgtaatgccggcgaaagcaggggagattcttcccctgcttttgtgttatatacaggccgggataccggtaagggtagtattttgccgtaaaaaagtgtacgataggtacaggaaggggtgatacaaatggataaaatcatagctaagagaaactatatgcgaaatcccagagagaaggtgaggcattggggggcaaaagaattgtgcagcagttttgggatcaactatgacacaaaaaaagagaatgccagactggctgcactcatttttcaggcggtgtctgaagattatcaggtgccccggtcttatgcccctattgcatccagggcattcctgttaaagggggttggtgagggtattttggaggattcctttttggctttggagggagacatcgtacttacccatcctctgaaatctctgtcagacaaagaaaatattcttctggcagctgttctcacaggaatgcgggcagatgctgtgggcggggcaggcatcaaggagtatctgaagaagatgcaggtgagcaaaaagtatgtgccggttgtggaggcggcaatagaaagtgtacagctggctgagaagcaggcaattcactctgagagggaatgctcaggcggacagaatgggggaagctctagcttttccgttcagctggagctatatgtcagcaagcagttggatatcatccgacagctcacagaaaagacttctgactatggagatccggaggtcatacatgatattcgggtagctttccgcaagctgtactctgtgactggagtatttacccggtatatgaagccccagtggagctcctgctatcaacccgaacttaaccgaaatcttaaacaattaggtgctctacgggatctggatattctgaatcaaaaacaaatatattttctggaaaagaaaggcatcggcccggaagtgtttcctgtatggaacaagatcataggagaaaggagagagggatgtctgagagcgatagagcagcatttctcctctgacgaattcccgaagctggcggcagctatggaagaagagataaagcaggggatctgtacccctgtgctttgcagaggaaaagaggcgtgtctatttttcccggaggaagtaaaagaagagtgtgtccggcgtgcagttatgaaaatcaaagcacagaagaactggatggaaggcctgctggttccggaaccggttcttcataagcttcgcctttcctttaaggaattaagatatgttttagatttcttccgtcagattctggacaaagaggaagcagaaatgctggaagcggccacgctgttccaggaggtcctgggagatctgcacgatgagagtgtactcctccaggaaattagaaaattatgcaaaaagtcggaaagataccagctggatcctgaggagagaacatacttaaaaaaatttgaacatttctcggaaaaggagagaaaccggcactttgccttatttgaaaaacattgggaggcgtatggtaagaaaacatactcataatcacctgtgaacagcttccgcggactttgaagagttggtaagtatccatatggaaaaaaaatcactgtccttatatggataatcatacgccaccggcagctcctccttttcaattttgtgaaaaccggccttttcataaaacttatgtgctctgtctgcgtttttgggggtatctaaaattattctttttacgccattttcttttgcaaagttcaaaagtgttttatataatttcctacctaaatggtgtggtttccctcgatatgcctcagacacaaaaaatttttttaacacaccaaggccgctgccgcacatcataagtccgactgagccaacaacttttccctgttcctttgcaacccagaaatttccgccattatccagaaatttttctttgatatgtagtaactccggctgatcgtctacggaaacgaacgggcgtgtaccatcgttctggcaatgcagaacaagcgatattacttcttcacgatccgcctcgacatatgtttgaattttcatgatgcactctccttatattcttcacccagttttacccatttttctgcaagacgtttcgctgcagaaatgaaatggccaattgtaaatgtaattatgattgtacctatcccaaaggtaccgcccactaaaagcagggaaataaagccggtaatctcaataagcaatcttgactttttaatacttcccaaataagaattggaaagagcagtcataagtccgtcaatgggcattttgggataaccggttgccacatagagccctgtacctaaagcaactaataaatatccgcatagaaatagtgatacacgtgcagcaacgccaggatgcataaagtttggggataccatagcttttgcggcatctaaaaagattcctttgtaaataatgggaaagacagagagccactccattttgcggttgagggctgcggctatgagtaagaaagctccctggatcacaacggaccatgtgccgaaagaaaagggtgtgatccgttccaggccggcgaataccccattccatgcgtctaatcccaaatttgtttttaacacgagtgcaacgccaaagcaggtacaaagcagtccgatgagataggcgggaatccttttacagttttctttgtgatttctcaacgacttgacaccctcctttcttagggatatcataacataaacaatcattattaaaaaattgaaccttttgaagttttagttcatttttactgaatgattatggagagggggaccacatggagctaaaatatctaaacaccttcaaaaccatactggaaaccgggagttttcaaaaagcggcagaacgcctgaactatgcgcagtcaaccattaccctgcaaatgcagctgctggagaaagagctttctgtaaaattgtttgaaaagatagggcgcaaaatgaagctgacgcaggcgggaaaagaactgctcccctatatcaatcatgtgatagaagctgtccagcagatggagaattacggaaagtctaaccaggagctgtccgggactttgcagatcgccatcccggaaactctgcttgcctaccaaatgccacaggttttaaaacaatttcggcggaaagctcctaatgtaaaattgtctatacattctacaaattgttatgaaatacgggcacaagtaatgagtggagctgcagacctgggtgtgcattatgatattggcggatatgcaaattctgttatagcggaagaactgcggctatatgagtttattttgataggaagtgcggagcttgacacggctgaaacggattttatatctcaaaaccaacggaaaaggttatgtttactggttgatcaaagcagttactattataaaaaattcagggaatatttacaagaaaggaatatttttttagagagtgaggttaacctttacagtacggaggcaataaaacaacttgtaaaagagaacttaggcattgcgtacctgcctcgttttaccgtagaggaagagttaaaagctcacatcattcaggaaatccctacagccattcaaagcaaaaggatcgggacagtatgcacatatcataaaaataaatggattccccctgctatggatgtatttcttcaacttttgcgggcagacaaaggttctgtcacatgagcctggagtacatagccattgacgcaaagaagccgcccattgtctccaatggcggctttccgtcggccctaagcccttttctttaaccgtctgggggccgcattatagtccccgggccccaggcctaaaaaccatcattttttcccaccacaagactcccgcacggtcaattcaggcgtcaaaagaatttctttttttggaaaggacgcatcttccagctgatatcttgaaaggagataattgattgcagccctttctattggtgtgggacttggctctacacttctcaaaagcgcaggggcattcgctgccttcaacccgaataaccgtatttttctggaggatggcgtgataacaggatgtattactgctgtaatcctaaacctgatctttaatggctacagggaaaaagaaatgattggaaagccggatgcagaagctgctgtatccggctggattttgcctctctggcagtagctgtggcgaaggagattatggaggggcagaactatgaaaaggatattgtgatggagacagagctttgtgatctttctaatgtagaggaaatgttaaagaaacacagaagaattgaaggaaaatgagaaaagaccggggggatcagatgaaatctttgcgccggcgtgttatacttaacgaaaatcagataataccggaggcagagatggacagggaaaaaagactttcagacagtattgcggatactctcttatcaatgattgtagtagataaaaaattccgtcccggggataaattacccaatgaaaatgatctttccatggaattaaatatcagccggacaactctgagggaggctatccgtatacttgccgcaggaaatgtggtagaaatcaaaagaggaaagggaacctttgtgagagaagacttcacggatccttccatggagaatctgtcaaatttgacagtggcaaaagttgacgctgaggatctgtatgagatgcggctgatttttgaaccagaagctgcatattatgccgctaaacgttctacagagtcagaattaaagaagattctttcactgggcgaaaaaatagagtgctgtatacaggagggaaaagaccgcacagaagtggaacaggaatttcataaagcaattgcaagggcatcacacaatgaattcatgaaccggctgatgccgattatttacaaggccattgataaaggagtggtgctctcagaggccaaaaaagaggccgtggaggatacaatttccgatcacaggatgcttatgaattttatcaaagacaggaacgcggagggagcccggtatgctatgaagattcatattatgcatgccattgagcagttggggctggaaaaatagaaatgggacgttgcagtgcaggcgggagttggcttgcaggcggcgtctttttttgtctttggtattcaggtattcaggttggcagagggatggtgatagaaatcccgcgccgtgggctgggagggatgttgtcgtacaataatattgacagcagacaacatacaacatataataaaacaaacaactaatagaaagtatggaggaaattgggatgagaagtgacagaatcacacaggggattaacgctgcgcctcagagggcgctgctacatgcgcttggtcttacagataaggagattggcaaacctttgatcggtattgtaagctcctacaatgagatagtacccggccacatgaacattgataaaattgtagaggctgtccgtcagggagtgctgcaggcgggaggggttccttttgtatttcccgctatcgcagtttgtgatggaattgccatgggacatgaggggatgaagtattcccttgtgaccagagaactgatcgcagactctacagaggcaatggctgcagcccatccttttgacgggctggttatggttcctaactgtgataaaaatgtaccgggactgcttatggctgcagccaggatcaacatccctgcggtttttgtgagcggagggcctatgctggcgggcagaattgggaaggggaagattagttattctactgtatcagaggcagtgagccagtttaaaaccggactgattgatggggatacattaaataaatatgaacatgccgcatgtccaacctgcggttcctgctccggtatgtttacagccaacagcatgaattgccttacagaggtgcttggcatggccctgcatgggaacggaacggtacctgccgtattctctgagcgactgaggctggcaaaagagacagggatgcagattatggaaatggtgaaaaatcaaagaactccaagaaatattatgacccgggaagctttttgtaacgctctgactattgatatggcactgggatgttccacgaacagtgtgctgcatcttccggctattgcctatgaatgcgatgtgtctctgaatctggatgtggtcaatgagatttctgaaaagacaccaaatctctgtcatctggcaccggcaggggaacactatatggaagatctgtatgaggcgggagggatttacgcagtaatgaacgagattcagaagctgaagctgctgcatggggaatcactgttctgtaacgggaaaactttgagagaaaatatagaggggcatttggttaaagattatgatgttatccgaagcgttgagaatccatatagcaggcatgggggaatcgcagtgctgaaagggaatcttgctccggaaggatgtgtggtgaagcgttcggcggtagctgaaaaaatgatgcatcatacagggccggccagagtctatgacagagaagaagaggcgctggaagctatatataagggattattgagtgagggcgatgtggtagtaatacgctttgaaggacctaagggaggtccgggaatgcgggaaatgctgaatcctacgtctgctattatggggagcgggctgggagactgcgtagcgttgattacagatggcagattttcaggtgccaccagaggagccgccatagggcatgtttccccagaggcggcagcggggggaacgattgcactggttgaagagggcgacttgattgagatagatattccggggcatcggatagaactgctggttacagaggaagaactgctgacgagaagagcggcctggaaacctaaacaaagagaattaaaaaagggatatctgcagagatatgcaaaaagtgtaacttctggtggaaaaggagcggttttggaatagacgaaaaagaaggtgtgtttcgggataaaacatgctatactgacagaaaaagataaatccgagatacctttactgcaagttttttctgcgggtaagggtatgagtatggacagagggatgtaaaatgaaagaaaataaatatgaccagaaggtcttttttgagaagtacagcaaaatgcaccgatctgtacatgggctggatggagccggagaatggcaggaattaaaaaaactaattccggatttacaggggaagagggtgcttgatcttggatgtggatatggatggcactgtatctatgcgtcttcctgcggagcaggatacgttctggggacagatatttcggaaaaaatgctggaagtggcccgtgaaaaatccaggtctttggatattacttatcagcaatgcccaatggaagaactgaagctgacggaaggcagctttgatgtggtgattagctctctggcctttcattatgtaaaagattttaagggaattgctgaaaatatatggaaatggcttgcagagggcggcagcttagttttctcggtggaacatcctgtctttacggcatatggaactcaggattggtattatgatggtaatggagaaattctgcattttccagttgacaactattactatgaaggaaagagagatgctgtttttcttggagaacatgtgaccaagtaccacagaactttgactgcatacctcaatacgcttctggactgcggatttgccatccgccatatagttgagcctatgcctccggaagatatgctgggacttccgggtatggcggacgagatgcgaaggcctatgatgctgctggtgtcagcggaaaaagaagaaaagagatagtttttttaaagaaatcagctggaagcaatgttttcttttgatctgcattaaactgtttgacaaaccgcctgccattggcgaattatcaggagccctgggcacatcacatcaaaatgtaaagcaaatgcttttgaaactggaaaaggggggatatatcaaactttttccctgatttcaaggatcgcagaaagcagagggttatgatttctgaaaagggaattgccttcgatcgaaaatatgctgagcccagccgggagtttatggagcaattgttcagcggtatagatacggaggaactcaaggtgacagttaaaactatgatgaagctggatagtaacttaaaggagatgcaggaatgaacagaatcgtagtgtatcaaagtaagacagggtttaccaggcagtatgcagaatggataggggctgctttggggtgtgaagcaaggccgataaaacatatttctgcccaggagttaaaacaatatgaaggtgtaattttcggcggttggatcatgggaaatatgattatggggcttgaaatgataagaaaagagataccgtgcaattatattgtgtttgctgtaggaatttccccgaaaagtgacgtgctgatacgtgagataaaggagcagaataagctgggggacactccgtttttttatctggagggcgggctttgccaggaacagctgggggttgtaaaaaggatgatgctgaaaatggttaaaaagtcagtgttaaaaaaggaaaataagacagaacaggatctgttcatggcccgggctctgggaacttccttcgaccattccgatgaaacctttattcagccgctggtggactttgcactctcggaatgaatttttaaatccgaaagaagccggttttgcagtatgaactgcgaaaccggcctttctgctataaatctctcacctttgcccacaattcaatgcaggagtccttctcaaacggacggaaatacttttggattagtatattttcaggaatgaggctgtgggcgggcagccatacgtcatacagatatttgctggctttatataatgcttcatctaccaatagttcgaaagtctccgcagtataccggcatacaatatatgtgcctgccggcataatgcgggtctcgccgcctcccgtgccccagatatcctcaacacctacaaagtagttaaaatatcccggacaatcggaaagggttaaaatatctaccccaaccgcactgtcaggcaggtctcgggttacggtatcccacagatctgtgagcatatttaccttcggctggccgagttcctctgttttggcgagcttactttgcccggagaatacaatatcctgttccaccagacggcgggagatttccaaaaccatctgatccgtaacgagaggttcctgcatatctgccattgtatggttcaaagacagatccggcttctggtaaacgtccagatgaacctcactcttgcggtaagcatccggtgtaatcccgtatacttccttaaagatggaagaaaatgaactgtgactctgaaatccgcatgccaatgccacctcaagaatacttttttctttttcttctctcagcagtctgatcgatctggccagacgccgtaatcggatatactccattacgctttttcctgtcagccgctggaacagccgctgaaaataaaattttgacagatgacaggcggatgccagatcctctatgcgtatttcttccccgcaatgtgcctcaatataatctacagcaatttgaatagattcccatgcgtacataatcgctacctcctgaactgtattctaccatgaatccgaaaaagatatttgctccagaatgcctttttgcatattttgtgctgacagttacatggtatcctttgtatactatgcctctgataagtgcctatcccacttcaaagtgcgtacttttcaaaagatacctaaggttttatgatacttgtatagacagcggctgttataggtaactcaaaatatctgcggggcagctttccagtcgtgcactggtatgtaaatgtgaaaggaagcagagaaaatgaagaaagtagtagaatttttacaggcaaatccggtacagtatctggcaaccgtcggcagagacgggaaggcaaaatgccgtccgtttatgttctgctttgaaaaagacggtaagctgtggttttgcacgaataaccagaaagaagtttataaggatatgcaggagaacccggaagtggagattagcatatccgatgcatcctatgcctggcttcgtctgcatggaagagctgtgtttgaagacaacatggaagtgaaggaaggctgcatggaaaaccctatagtgaaagggcagtataataccgctgacaatccaatctttgtggtattttatctggaccatccccacggcgtgattgctgatttttccggcaatcctccttatgaattttagaggtgagtactgtggatgccattgcagaactgtgtgcaaagcttaagcaggcagaggctgtcattgtaggggcaggggccggtctttctgcctctgccggtttttcctataagggagagcgttttcgccaatattttggggactttgcagaaaaataccacttcgatgatatgtactccggagggttttacccctacgatacgctggaggaatactgggcctactggagccggtatatttggattaaccgctatatgaatgcccccaagcctgtctatcaggaacttttggaattgctgagagataaagagtactttgtactcactacaaatgttgaccaccagtttcaaaccgccggatttgacaagcagcggctgttttatacacagggggattacggactgttccagtgcagcaagccctgtcacaggaaaacctacgacaataaagaaatcatccgccggatgtttgaacagcagaaaaacatgctggttcccagggatctgattccccgctgtccggtgtgcggcaggcccatgagtatgaatctccgtgcggatcaaacctttgttgaagatcagggatggcatctcgccgcggaaagatacgaattgtttctgcagcggcatcagaaccggcggctgctgtttctggagctgggcaccggttataatactccgggcattataaaatacccgttttggcagatgacgcaacaggaatccggggctttttatatctgtgtcaataacacagaggcgtttgcccccaaagaaatatacggcaggtccctgtgcattgacagagacatcggagaggtcctggggagagcactgacatggaacatgcaggcgtataccgggatatagtctgaggaaggagcagatcatgaatcaggataagagattggataaattgctgcgaggattctgtgaggactctttggattacaaaaatctgaacgtggagaaagaagagaggagggacgttctgcgcgcccttatgaatctccggatgcccgggccgcttccggagaagcttctgcagcttcaggacgatttcctccgggaagaagctatggagaagggaatcataaccccggaacagattccttctgtgaaagaacaatatggagtctctggcgggcttgctgagaggatttcggtgtggcagggagatattaccaggcttgctgcagatgctattgtcaatgcggcaaactccggaatgctgggatgctttgttccctgccacagatgtattgacaatgccattcactccgccgcaggagtacagctgcgacaggcgtgctatgaaattatggaaaaaaaacgagaactatacggggccgattatgaggaacctaccggtgccgcagagataactccggcttacaacctgcccgcaaactatgtgatccatacggtgggtcctattgtgtacgggagcctcagcccctccctggagcaggacttgggaaattgttatcggtcatgcttgaagtgtgcctccgcatacaacataaaaagtctcgcgttctgctgtatttccacaggagaatttcattttccaaatgaaagagcggcagagatagctgtgaaaacagttgtgtcgtatctggaagggcatgcagaattagaaaagattatctttaatgtatataaagattgcgatctggccatctatcaatctgtcatagggcaggggatctgatcatttttgcgagagtaattgttctgcacagccggattgaatggcactgatgtttcttgcaattctctcattcggcgggatatctttcgtaacaaccgcccttacgccgatcacggctccgtcaccaatggttacctccgcaagaatgacagcttaataaccaatccacacatcattacctatcagaatatctcctttattgtccaaggaaacggcacctccttcctgtccagtctccattcttcaaaaaagagtgggaaaggataaatagagagggagttcaacgaatgattcgcgctgttaagcaggaatttggcaccgcaggctatggagcagaacttgccaatgataagtttgtccctgatcacaggataatggtacaacacgttatttatttcaaacatggcagggtcattcttaaaatcgttgtacatcgtataatttccaacctctatattgggattcgtaatcacgtttctcagatatatggtctgtttatctccggtacggagatatatttttttagaatcagtcatttcaaatcctccattaaagggaatggtatgccaggggggctatatgtctatgagtataacatctggttgttccatatttgagataatacaggcatggctgacgcaggggagccctcgtttcggaagctgaaggaaaccattggacctaatcatgcgcttccttcggatatactatcgggcgcgaggccagtgatagcttactttatagctttttcagcagcaggctgggcagtatattatcacagacctgagccttactccaacaaaaagacctgactgagagtactgtctttataaacgatacggaagctgcggcaggtgtgtggagcggtgtgtgaaccttcggaaagtgtatttgcggggttccctgttctgtgaaggcccccgggtgaatgaaaaacattatattgatcagaagtaaaggctgtccacagacaaaagtcatagcctttcttatttttgtaagaaattgtcacgaaattatcttataaaagaaaattatcataaattatcttgacgggataaaaagcttactatatactatacgtaaagggggacagataaaacaaattggctaatgtcctcaactcgaaaatttaattgcgtatgaagcgcaggggaaaggatgggttcataaaatgagcacaacagttagatgtattggggccggaaacatcgtaaaggcaattctttcaggggtggagaggagcggtgtttacagtccggaagagatggcgatctttgatatttcgccagccgtacgggaagagttcaaaaggagaggctatactgcgtttgaatctattggggaattggtaaaaggggctcctattgttttggtcgctgtgacgcctcaggtgattagttctattattcaagaggttaaggaggctctatccccagaaaccgtgttgctttccgttgtggcaggtatgagcacggactggtatcgcgagaggctgggagataagtgtaaagttgtaaggtgcatgcctaccctgacggctcaggcgggaatgggagcttttgcgatttcccgagcacccgcggtatcgggtggggattttgaggaggtaaatcgtttcctgtcaagctgcggtatcgttgaggagataccagagactcttatgtgcgaagttgttcctataaatggttcagctccggcttatttttatcatatggcccgggtagcagtagaagaagcggtacatatgggttttgatgaaaagactgcgctgcggctgttcgctcagacaatgaagggcagtgctgagatgcttctgaattcaggaatgagcgcagagacgctggaaaataagctgcgccttccgggggggacgactcttgctgcgcttgataaaatggatgaacttggctttgacacctgcctgaaagaaggtataaaggcctgtgttgaccgctgcagggagctggggcagctgtaagcatcaaataaaataaaaaagggagaaaaacttatgcagagatatcaggttttatcacaaaatgaaatcgaacagatccatgaaaatacacttcgcattatggaaaatatcggagtggttatgacgtatcagcctgcaagagacattttggaaaagggcggtgccatactagacggcgaacgagtgcggtttccgcaaaagctggttgagaaggaattgaaaaatgttccatcatcctttactatgtatgcccgtaatccgaaatacaatgtgactcttaacacggaagattctgtgtatgccggtccgaactgtcctccgtttgttacagatagggacagaggcagacgcccgggaactctggctgattttattgaaattattaagatctgcgatcggctgaaaaatgttgatatccagagccagattccctgtgaaccaggggatgttgaggtggcaaggcgtcccgatgttatgctttataatacattaaagtacagtgagaagccttttatggggagctctctggggtatgaaaatgcgaagagggggattgaaatggcctctcttgcatttggcggtatggaagcaataaaggaaaagccaattatggcctctattccctgcacactgacacctcttgcctatgatgacagcatgctgggtgccctgatggcttatgcagaggcgcgtcagccccaattgattaattctcttgctatcgcaggaatgacagctccaactactctggccggcttggtttcggttcagaatgcagaggttctggcggggattgttctggctcagcttattagcccggggactcctattgtatactcgggtgccggagcaaatgcggagatgtccagcggggtattatccattggttccccggagcatgccctggtttccctggttgtgggtcagctggcaaaatattatcagattccatgcagaatcagcggtgcactttctgattctaaattggtggatgcacaggcaggttatgaatcagcggtgactctcacgatgggacagatggcaggtgggaattttattcttcatggtgtagggattatagaaggctataactgtacctctttggaaaaattgattattgataatgagattattggctatatgaaacgaatcaataaaggggtagctgtcaacgaagaaacacttgcatatgatgtgatagaagaaatagggcctaagggaacctttcttatacatgatcatacactggagaattttcgggatgaattctacatgccgacaatcggtgaccggtgggtgtatgaacagtggaagagcagaggcggtctttctgtcgaagagcgggccaataagaaatggaaagaaatattggaaaattacggagaacctacattgcctaacgatatcgatgcagaactgcagaagtttatggaaatatattagcaggagtatgcttttgggctaagtataatttagagaaaagaatctcccggaggattgttcatacagacctccgggagattcttttctcgtattctgctgacataaagagaagaaaatccggacaaatagagaaaattacttatcattctctctgccttatgttatactttatcgtacggttaaggctgtatacccgcccttagaaggacggcactgtgagaaatcaacttaagaacgaggaaataaatatgacagatttcaaattattgggtaaaaagttaaaaagcctgcgcaaagaaaagatgctgacgcttcagcagttatcggaacagtcggggatatctaccggatatattagtaaaattgagcggggggctgtaaatccatcggtaaaaaatatacaaaaattgtgttttgttctggatatcacagctaatgaattaatgattgatgagacagagaagataagcagtactaacaaagaaaagagctatattttaaggaaagaggagcgccttcctatttacgggattgtgaatgctcttgattttgagtcggtatttgaggatagtccgcattttaaagtgaatgttctgacgctggtgagcggtatgcgggaacaatcttataatgtccatagctatgacgaattcggaatagtagccaaagggaagctgggactggaaatggatgatgggaactatgaactttcagaaggagactgtattatgatacgcgcaaatacaaaacatacgataacaaaccgttcatttgaagaatgcattagctattggattgaaatttctaaataaaagtcagcaatgtccggcgtttggaatataacgaagtaaaataattctgctgatgccgggataatttaataagcagagaatattttgcttgtctgaaatgataatttgttttgtttttctaagtattatagatggatgcaggataaattatcatttttctaataacagattctgtttaaatcctatctaaaagcaagctctacggcaataatggttgtctttgataaaaaatatcatataagaaaaatttcttaaatgatatttttcctcttgttaaaatctatgcaaaatgatatagttattataacaataagtattcggccggaaaccgtttcatttaggaattcatatgggaggtaactattgtgaaagacaaagtaaacatggaccgtatcatgaggctcaaaaacagggtcttaaatgctcgtccagaaatggatcttgaaaatgcattgattctgacccggggattccgggagtcagagggagaaccttttgtagttcaaaaggcatatgcctttcggaagcagtgtctggaaaagacagtaaaaatatgggatgatgaattgattgtgggtaattcaggaagcaaacagcgcggcggcctactgtgccctgatacctgctggtctgtactggatgatgagttggataccataagcaccaggaaatacgatcctttttatctgagagatgaagatagagagcattttgtggatgagatccgaccttactggaagggaaggtcaacctacgaaaaatggctctgccagattccggaagatacaagaattcttcgtgactgcggggttttgtatattaaccgcaaagctgtccgcggttggggggagacaactgcgggatacgaaatgattctgaaagaggggatagaaggggtaagaaggaggattgaagagacgagagcagctttggatatcacgaaaccgggccattatgaaaagatggtatatctgcgtgctctttctctcagcgctgacggggtagttcagctggcaaggcgttattcggcagaagcatcaaggatggcagaaaaagagacagttaagacaagaaaaaaagaattactgtctattgcggagatctgcggcagagttcctgaaaaacctgcggagaccttcagagaggcactccaatccttctatatctatcacacctgtattttcatggaacagaatgcggcaagctataatccgggaagaatggaccaatatctctatcccttttacaaagcagatctggaagcagggagaattacacctcaggaggctcaggaactgctcgactgcctgtgggtcaaattcagtgaaccctgcctctttcaggatgaaaagacagcacaatattctgcaggctatcctatgttccagaatatctgtgtaggcggcgtggatgaaaatggaatggatgctgtcaacgaactctcttatatgattctccaggctactatggacgtacagctttatcagccatctttgtctgtgcggtatcatatgatacgcaatcccaatgcgtttttgaaaaaggtggcggaattgataaaactgggtacgggctttccggcatttcactgtgatgaggttggcattcagatgctgatgaacaagggcattcccctgaaagaggcatataattggaatccttgcggctgtgtggaaaccaatcttgcaggaaagatgcattgctatacgtcatatgcggactacaatctaggctctgttgtagaatttgctctaaatgatggccacagcaggaagtacgacgttcccgccggagcaagaacagggaatccatgtgattttaagtcgtttgcggacttttttaaggcggtaaaggagcagattacttacatcatacgggcaatggttgcgggaaaccatgtaaatgatgatatttgtctggaacgagtatgtcctgccctgtctttgtcatttgaggattgtattacaaaagcaaaagattatgcctggggcgggccgaaatacaatgtaggcaacggtctggatgccattggggtagcggacctgattaacagcgtctatgcagtgaagtatctagtctatgataaaaagatgctaagtatggagaaacttctgcaagctttggagcataattttgtcggctttgaggagatagaaaaattatgcctggaatgtccgaaatacggcaatgacgatgaggatgtaaatcaattaactgctgaattgtttagctttattgctgacttaattgaatcctttgacagtaagtacggccacatgacggcagggattcttccggtatcaggaaatacgccttttggcctggaggtcggtgctcttccgtcagggagaaaggcatatgttcccctagccgacggggtcagcccgaatgcaggaacggacataggggggatgggagccgtaatgaaatctgtttcttttattccccatggaaggttcagccagggaactctactgaatctgaagctggatcctgcgtttaatcaaagtgaaaattctacccagtccttaatggcttttctgaagagtatgtgctcgcttggagttttccatgtgcagtttaatgtgattgatagggatatacttatagatgcacaaaagaatcctgaaaaacataaaggattattaatccgagtggccggctatactgcctactttgtggaactgggaaaagaggttcaggatgatattatttcgcggacggcacatgcgagagtgaatgtgtaaacatagtagtgaataaatcggaaagggttatttgtatgagcagagaagctcaaattctgagaatcgagaaactatcaccgaatgatggaaaaggtctgcggacagtggtgttttttaaaggatgtccccttagatgcaggtggtgttcaactccggaatctcagaaaatggaacaggaactttactatcggcaggctatatgccgaggttgcggcaaatgcgtgagcagctgcccgcagaaggctttgtctctggacgacagtgcaaaccgaatcaagagagatgataacaagtgtacgaagtgccttatttgtgcaaaggtctgtccgacaaatgcggttggtgtttacggccaggttatgactgtggaacaggtgatgaaaatcattttgcgggatgaagtatattactatcactccggtgggggtgtcaccttaagcggcggagatgtgctttgccaggcggaatttgcaagggagcttttgtctttctgcaaagatgcgggaattcatactatggccgaactggatatgtatggggattacagtcggattgcaatgctgctgccatacctggatgagttttacgctgatattaagataatggatggtaaaatacataaacagtatacaggtgtggataatcatttgattttagaaaatataaagaaggcatcccaattcagcaggccgggtgcgcttcatatccgtgttccgctaatatggaatataaatgataatccagagaatatatcagagacagcagaatattgcaaagcgcttgcttcctgtgaagaactggaattcctgccataccaccgccttggagagtctacctatgaatatcttgggcggggatatgcaatgagtaatttgaagcccatgacttttgaggaggcttatgcaaaagttgcttttctgaagaatttcaatatcccctttcctgtcaaagtatccggcagaattctaaattagtcagccggtatgttttacaaaaggggacagactgtcctattactaattgtaccgtcaatcggacggtggaacggagaagcttatgagaaaaatgggttttaaaaagttaatgatttttattatactgagcgcaactgttgcgctcgcttatcagattccatatcttcggtttacattttatgatcagatgactgctgcgctaaatcttacagatacacagatgggactgatggctacggcggtatctctgaccagtactctctgctatcctattggaggcatctttgctgaaaagttttcctgcaggaatctgatcattatttcattggccggtctggctgcctgtacggttgtgtattctatgacaactaattttataattttaatgctcgtacacattttgtatggattttttggtattgccactttgtggtctgcctacctgacagggatacgttctcttggggatgaagagagtcagagtactctttttggcagcagcgaggctacccggggaattattcaggctgtgggaggctttctctttctgggcatcatgggtgcggcagcgtctgctgcttccggtttccgctttgttctccttgcggggatggttatctgtgtgctctttcttattctggcctttatctttctgccaaagggggaactgaacggggaggatatcgggaatgatagtgaaacatcatatactatgctggatgctctcaagtgcaagggggtgtggattactattggtctggtagcctgtgcatatgtatcctggactttgggtaatggatatctgaccacctatacggtacgcgttcttggagttgctgagtccacggcttccacacttggtattattagaagctatattattgtatttctggccggatttatcggcggctggttgctggataagtttaccttcaaaggaaaaggcttttttgtattatttacggcagtgacagcagctactgtagcaatgatgcttacaagcaaggtagtgcccgtatgtattgttatcacaatgatccttgcatttattgcgaatataatgaaatccacctattggagtactatgggtcaggcgggcatccctataaagatgacggcggttgccacaggagtcgtttcatttattgcatttataccagattttattgttcctacagttgccggcgtatggctggatgaggcaacaaagggggggaatgtggcagcaggcttccataaaatctttattcttttgtttgtgttctcggctgctggtctggtaatatcagtaatcttaacaaaacaggcaaaatcaataaaagaacaggaataatacctttccaggaaacgggctgccagtcataaaatgaagaggaaggacgctgtgccttcctcttcgtttattggtctcttgcctacagccttttcagatacattttttcggccagattaatgagagagtataaaatcattgccataatgcataacagtacgattgacatgataacccagtccagtttaaatacctggctgccatagatgatcagataccccagcccctctttggagccgataaattctccgattaccacacctaccaggcaaaggccgatattaactttcataaccccgagaattacagggacggaagccggaagcacaacctttagcagagtatcttttttctttcctcccagcgtatagataagttttattttatccggatctacctccttaaatccgatgtagaggtttatgattgctccgaaaattgccacggacatgcccgcaacaatgattgtggtagtgtttgccccaagccatacgatgagaaggggagccagcgcagattttgggaggctgtttaaaactaccagatagggttcaaggatggccgataccttcggggaggaccacagaagtacggcgatgcccacaccgaagattgtgacgaagaaaaagctggccagtgtctcccacagagtgacacccatgtgaataaacagggagtggttctgtgccatggagatcatggtctttataaccctgctgggactgctgaatacaaaggagtctatccatgtaaggcgtgtgcttatttcccacagtgccacaaagataacaaagattgctgcccgtgccagctgtaccagctgccgggagcgtttcaggtttttcaggtattgtctctgccccgtagacattttaaccacttctttactcaccgtgattcagctcccgccagataagattaaaatacgttttgaaattaggggcatttctggaacccatgggggttctttcttcctggtcaatttccaattctatgggaactgtcttctgaactgttgcggggcgtttggtcagaacgataacgcggtcggccatgctgatggcttccgagatgtcgtgggttactaatacggcggtcttagattcttgctttataatcttgcctatatcgtcacttacattaaggcgtgtctgataatccagagcagaaaaaggttcatctaataaaagaaggtcaggttccaatgccagagtgcggataagggctgctctctgacgcattccacctgacagttgagaaggcttggagtttttaaaggtgtcaagtccgtatgtctgtaaaagagaatcaatttgttcccttttctgtggggtatctttcttttgaatctctaatcctaacagtacgttgctgtatatggttctccactcaaacaggtgatctttctgcagcatatagccaatgttcatctgattctcacttaatttctttccattcatcaggatttctccctcttccggggtgagaaggcctgagatcaggttcaggagagtggatttgccgcagccgctggggcctactatggcgacaaattcacctggctgaacctgaaaagatatatgggatagtgctaacgtctctccatcttcgctgtgataagaaagactgatatcttttaattctaacaaaggtgtttgcatatgcgtcctccatgatgtgtatatagtatcatatgaaattgaaagaaaagagtgctgatgctataatgaaaaagaggtgaaaccacacatgatcagaaattatcaaaaggaaatggaaaaagtcatcgaaaagctggaaaaggaggactctgtaccgcgtctgcttcttcacagctgctgtgcaccctgcagcagctatgtactggagtatttgtcccgttattttaagattacagttctgtattataatccgaacatttaccccagggaggagtttctgaaaaggagagaggagcaggaagcgtttatccgccgtctgcctgcggcaaatcccatagagtttatgggaagcgagtacagggaacaggagttctatgatacagtaaaaggatatgaaaagatcccggaaggaggagagcggtgtttccgctgttatgctctgcgtctggaggaagcagccagggaggcaaaaaaaggaggatatgatttttttaccactacattgagtatcagccctctgaaaaatgccgggaaactgaatgaaataggagaggcactggcagaaaaatatgggactgcctatctttcctcggatttcaagaagaaaaatggctataaacgttccatagaactttccagggaatatggaatctaccggcaggattactgcggctgtgcattctctaaaaaggagagggaggcggccaaaagggagcaggagagtcgacaaaattcttgcaatgccaagggctagatgatacactaatacacgattataggcggacagcgtagataaaattaagaaagaaatgaggataaaaaaatggcacagttatggggcggccgtttcacaaaggaaacggaccagttagtttataattttaatgcatccattgggtttgatcagaaattttacagacaggatattgcgggaagtatggcccatgttaagatgcttgcaaagcaggggattctcacagaggaagaaaagacgcagattctggacggactggaagggattctaagagatgtggaaaacaaaaccctggagatcaccagtgaatacgaagacattcacagctttgtggaagcgactcttatcggacgcatcggggaacctggaaaaaagcttcatacaggaagaagcaggaatgaccaggtggccctggatatgaagctctataccagagatgaggtaaaggagatggatggactggtaaaggaactgctttggacacttctccatatcatggaggagaatacagatacctttatgccgggatttacccatctgcagaaggcacagcccattactctggcacaccacatgggcgcttattttgagatgtttaaaagagacagaggacgccttcaggatatctgtgacagaatgaattactgccctctgggatcaggagcgcttgctggaactacctaccctctggatcgggagtacacggctgagcttatgggctttgcgggacctaccttaaacagtatggactctgtggcggacagagactatctgattgagtttttgtctgcaatgtccactattatgatgcatctgagccgtttttcagaagaagtaattatctggaattccaacgaataccaatttgtagaaatcgatgatgcctacagtacaggcagcagcattatgcctcagaagaagaacccggacattgcggaactggtgcgggggaaaaccggaagggtctatggcgctttgatgtctcttctcacaactatgaaaggaatccctctggcttacaataaggatatgcaggaggacaaagagctgacctttgacgcaattgatacggtaaagggatgccttgccctgtttaacggtatgctggccaccatgcagtttaagaaagagaatatggaatccagcgcccgaaatggatttaccaacgcaacagatgcagcagattatctggtgaatcacggggttgctttccgggatgcccatggaatagtagggcagcttgttttgtactgcattgaaaaggggatttctttggacgacatgaccctggaagaatacagaaagattagcccggccttccaggaagacatttatgatgccatcagcatgaaaacctgtgtggaaaagagaatgaccataggagctccgggggaagaagctatgaaacaggtgatagagatcaacagaaaatatctggaaaaaaattaaaaaaagtgttgatttttccctgcatatagtatagtattgtttaggaaagacaaatgtacgcggtgcaaaaacaaactgatattgtaacagaacttttgcactatacatagaaataaaatcgaggagagaagtattatgagcgataagttgaaagtaggtatcttaggagcgacaggtatggtgggacagagattcatctcccttttggaggaacatccctggtttgaagtggtaacagtagcggccagtgcaagaagtgcgggcaaaacctatgaagaagcagtcgggggacgctggaaaatggatacccctatgccggaagctgttaagaagctggtagttatgaatgtgaatgaggtcgaggaagtggcggccagtgttgattttgttttctccgcagtggatatgtcaaaagatgagattaaggcaatcgaggaggcatacgcaaagacggagacaccggtagtatctaacaacagcgcccacagatggactcctgatgtgccgatggtagtgccggagatcaatccggaacactttgaagtgattgaatttcagaagaagcgtctgggaaccaaaagggggtttgttgctgtaaagccaaactgttccattcagagctatgcgccggttcttactgcctggaaggaatttgaaccggttgaagtagtagccacgacttatcaggcaatctccggtgccggaaaaacctttaaagactggccggagatggtagagaacattatcccttatattgggggagaagaagaaaagagtgagcaggagcctctgcggctttggggtaaagtggaggacggtgtaattaagaaggcctctctcccggtaattacctgccagtgtatccgtgtgcctgtattaaatggccatacagctgctgtttttgttaaatttaacaaaaaaccaaccagggaagagttaatcgaccgtctggtgaattttaaaggtgtacctcaggaactggatttgccaagtgccccaaaacagtttattcagtatctggaagaggataatcgtcctcaggtgaaggcagatgttgactatgaaaaagggatgggcgtatccgtgggacgtctgagagaagatacagtatacgattttaaatttgtgggattatcccataatacggtcagaggagctgcaggtggagcagttctctgtgcggagactctcaaagcaaaaggctatatcacagcaaaataaaacaaagtaagcagcagccggcaggcgaagcgcgcgtcagcagcgggtttccctgccggttttgtcttcttgtgttattcatcttaggatggtataataagcaggattaaaaattgctgatgaaaatatgccaaaggaataattacagaatgtcaaaatcactctatatagcagagaaacccagtgtagcccaggaattcgccaaggcaatgaaggagaattttagaaggggcgacgggtatctggaatcggaacacgccgttgtgacctggtgcgtagggcacctgattaccatgagctatccggagaaatatgacgcgaagctgaaaaggtggagtttggataccctgccttttttgccggaggaattcaaatatgaaatcattccttccgtcaagaaacaatttgatatagtcagcggactattacagcgggaggacgtagccaccatctatgtgtgcacagactccgggcgtgaaggtgagtatatctaccgattggtggagatgatgtccggggtgaagggaaaggaacgcagaagagtatggattgactcccagacagaggaagaaatagtcagaggaatccgggaggcgaaggatctgtccgaatatgacaatctttctgcttctgcctacctcagggcgaaggaagattacctcatgggaattaatttttccaggcttctctctctgaaatacggaaatgtggtatctggttatcttcatacgaaatatacggcaatctccgtggggcgggtaatgacctgcgtgctggggatggttgtccgcagggaacgggaaatccgtgacttcgtaaaaacccccttttaccgggttctgggaaaactgaaccttaacggcaaaccctttgacggggaatggagggctgcagagggaagccgatattttcagtctccccttttatataaggaaaacggatttaaagaaaagaaacatgcccaagagcttgcagatatactctctgctcatcctcctctgcaggcggtgatagaaaaaattgaaaaaaagaaggaaaataaaaatcctcccctgctgtttaatttggctgagcttcagaatgaatgtgccaggctttttaagatcagtccggatgaaaccctacaggtagtgcaggaactgtatgaaaaaaagctggtcacttatcccagaacagatgccagagtactttcctcagctgtggcaaaagaaattcataaaaacattggaggactgcgtaattatatacatgggcagccttttgcagctgagattctggaaaacggaagttacaaaaacattgctaagacaaggtatgtaaatgacaagcagataacggatcactatgccataattccaaccggtcagggtctttccgccataaaccgtcttagtgaaaaatcccaaaaggtatttgaaaccatcgtaaggcgtttcctgagtattttttatccccctgctgtgtaccagaaggtgaacctggtaacgcttgtggaaaaggagcggctgttttcaagctttaaggtcctgatctcagagggatatctgaaagtgacggggaattcctttgcccggaaaaaggaagattcaggtgaaaaagaggaagagacttcctgcgacgcagccttcttagaggcgcttcagagtctgaagaagcagggggtaattccggtggaccgctttgagattaaggagggggaaacctcgcctcccaagcgttacacctctggttctatgattcttgccatggagaatgcaggtcagctcatagaggatgaggagctgagagctcagatcaaaggcagcgggattggaacaagtgccaccagagcagagatactgaagaagttagtgacaataaaataccttggactgaataagaagacccaggtgattactcccacacttctgggagaaatgatatttgatgtggtgaatgcgtccatccgctccctgctgaatccggacttgaccgcaagctgggaaaaggggcttacctatgtggcggaaggggatattacctcagaagaatacatggttaagctggagaatttcatcaaaagcagaacttacggggttctgaagctgaataaccagtatgtactccgccagtattttgataaggcggcacagaattacaagacatcacccggccggtcagcggcaaataaaaagaaagaagggaaaacaaatggagcagttaacaattaaggagttataccaggatttggatcagacattggcaaaggagctgctggagaagtatacttacccctgggaggtgcttccccacatcagcgaatttatagtatcattgggcaattctttggatgagaaggagtacgagaaaaaaggagaaaatatctggattgccaggagtgctaaagtagctcctacagcatatatcaacggcccggctatcatcggaaaggatgccgaggtccgccactgcgcatttatcagaggaaatgctctggtaggggagggggctgtggtaggaaactccacagaacttaaaaatgttatcttatttaacaaggtacaggttccccattacaattatgtaggagattcgatcctgggctttaagtctcatatgggggccggttcaatcacttcgaatgtgaaatccgacaaaaagcttgtaatcgtaaaggcagcaaaccaaaagatcgaaactggtttaaaaaaattcggagcaatgctgggagatgaagtagaagtgggctgcggttctgtgctgaaccctggaaccgtagtgggttctcacaccaatatctatcccctgtcgtccgtaagaggcgtggttccctccaacagtatttacaaaaacaaaacagagattgctgaaaaggcagctgattaaaaaatagagaaatcccgcgagactagctgacaattgtgcacctttttgccagattactcgcatattgagaaaacaaaggcgttttggcagagagctagagcgcctttttgctgtctctaagggagtattgtgttctggggatgcatagaataaaacgttgctgcaaatttgaggaagggtaggggatttaattcaatgaattggacatcagcttaggggtacacaagacggcaggtgtgggtggcagggggacggtgagagaaatcccgcggcagcggtccgtctggttcggacgggagggaggcttaagttccggggacacctccgtcgtgaagagagtctaagacaaaaccggaatccccgcaggagcaccgttcgtatggccaaagaatgccttatgtgcattctctgcccatgctcactttttttcggccctgactgccgaaaaaatctccagcgtgaatcccggttttgcctaagactctctactcactcctgcggaatcgtccccggaacttaagcctccctcccgcccaaaccagccagcccgccgccgcaggattcctctcacctgggtatggggaagttccaggggggcgctatctatccaaaacatcaagcggataataatgcgaaataagaggaaaagtgtacaactctcaacctttcccccgttttccgtgaatgtgaagtgagtctctgccaggtcaagggaggaggtcttggggccaggggtactgtgtggagctgcgcagactacggagtgcgtccgaagatccactgccggcggtcacttaggagcgaaggctttcctgagcttcttagtgaacggccaggcagttagctaaggagaaacgcagtagcaagcagatccacacagtacccctggccccaagacctcctcccttgaccgtccgtctgcgacacatcgctccccgactatataactccgaacttcacatacacaaaactataattttatgctaaaagccaataccgcaccccacacaataaaagcaaatgtaccggataaaagaagtaaaacagatacttcagcctcagccctctttctccgttatacagattgataggtacaaatgcaatgcaggccggcggctcccagagaagggagatacatccgaagagtgtccgctctacccgtctgtatctgaaaaggtagagaataacaatcagggctacccccttgaagtcgtagtctgtgcgcatcagataagccaggcccatgccgcctgccaggccaaggagcatgatataaggtttatcggaatacttttcgatgatgaccaataccagaaatccgaggaacaatgtaaacatgacattctgggatgtgaattctaaaattccctgattaaaagcaatatcaaagggaaattctgacagcagtgcaaacagaaagagccggaacccgtatttctttttatctgaagtatgtagaaatccttctactaaaagaaaacaaaaaataggaaacgaggtgcgtccgataaagcggaggaccctgtcaatttccaggatttttgttatctgctctgttgtaacggcagtgccggaagtgttgacatatttcagatagtatccattttccagtatggcagctccgatgtggtcaataagcatggttaccattgctatgatttttaatgtgcttccgctcaggcaggcatattttttttgttccatgttgttctctcctactcctatattttcagaattatagtataacagtaagtaattgaaaaagcaaaaggtggtttaagaaatcctttagaaaaactttagaaaaggaagcacctaatctttagattgtctctgtatgatatatttaacaagttgagaaagaaaaaaagttaggagtgattccatgaaaatattaattacaacagattggtatgcgcccattgttaacggggtagtaacttctgtattaaatcttaaaagggaactggaagaaagaggacatgatgtaagagtgctgacactggcatcggaaaagtattcgtataaagaaaataatatatattatctgaagtcatatgactttggaaagatttatccaaatgcaagggcgactatctgtcacagagaggagctggttgaagaacttattcagtggtcaccggatgtaattcactctcagtgtgaatttatgacatttccatacgcagtgaagatcagtaagaaatgccattgtccggttgttcacacctaccataccgtatatgaagactatactcattatttttctccgagcaaaactgtaggaagaaaggtagtggccgtatggagcagaaagcttcttgataaagtagatgcagtaattgtgcctacagcaaaagtgagaaatcttttgtatgaatatcaggtagagcagcagatagaagttattcccacggggattgacctgagaaaatattctgcaagaatcactgaggatgagagggcaagaagaaaagaactattgggaattccaaaggagaataaggttctggttaatgtcggacgccttgcgaaggaaaaaaatctggcagagatattagaatatatgaaaaaaatggacagaaaggatcttacgctgcttttggtaggggatggtccttacagagaggaactggagaaaaaaacaaaggaaatggaactggaaggccaggtggtatttgccggaatgatagatcccagtgaagtgggaagttattatcagctgggagatgtatttgtaagtgcgtctaacagtgagacacaaggactgacctatctggaagctctggcaagcgggattcctgcgctgtgccggaaagatgagtgtctggacggggtaatcacagacggttataacgggttccagtatgattcttatgagtactttaagatgcatctggagtatatgctggcggatgaggagagacgtctggtgatggcagaacaggcaatggatgatgcggtcaggttttctacctgggaattcggcaatcgtgcagaacagctttaccggcaggtgattggcgtacaggcagccaaggattatacagggtatcttttgggttggattcataatatggtgataaggaggaattcataatgtataaaataaatatgatgtctaaggcagatatggtgaagggacatggagtgctgtcagcacatgatgaacaggtggcgctggtaaaggaagaattaaaggatctatttcgggtggaagaaaacggaaaggctccaagtgaaataacccattaccattcaatcaaccctggtttttatctgtccattccattcagaaaaagacaggggagtacagtaggatatgtgcattttttaccggagaccgttgataacagcatccgcctcccccgtctggcaagaaagattttttacaaatacatgctttccttttataaaaaaatggattatcttgttaccgtaaacccttattttattgatgtcttagaaacctacggaatttcaagagataaagtaacttatatccccaactttgtatcagatgaagatttctatcctcttaccatggaccggcagaagatgataaggaaggaatatgggattgaagaggataagtttacagtactctgtgttgggcagctccaaaaaagaaaaggagttatggagtttgtggacattgccagaaaaatgccggaaatgcagtttgtatgggccggagggttttcttttggtaaaattacggacggttatgaggagatacggcagatgatgaaacatctccccgccaatgttaaattccttggcatggtggacagggagaaaatgaatgacatctataatatggcaaatgtaatgtttctgccttcctttgaagaactgtttccaatgactatcctggaatccatgaactgcggtatccctatcctggtgagggatttggacatttataaaccaattctttttgattatgtgttaaaaggggagtccagagaagaattccagattttactgaaaagacttcagaatgaaccggatttttatatggaagcatcccataaagcatttgagggtcatgagttttacagcagagaacatgtagggaaaatgtggagagatttctacattggtatactgaaagaacagggaaacagtcttgttcgctacaatacggcgagaagtatctatgaggtggttacaaaaaatggcaactaaagcaaaagagatctgtattgataacaataaaagaacagcaatgcttctgaatgtgagcacagtggtcggcctgattttaatgacactctttatcatctacggggtacagaataaaatcttttcttcccaggaggcactgtcacaatttttgggaagattcggattttgggctccctttattttcataatggttcaaattgttcaggtagtaattccaattctgcccggagcaatcggctgtctgggaggcgtgctcatctttggtcctgtgtggggattcgtatataattacataggaatctgcatcggatccgttttggccttcagactttccaaacaatatgggcggccctttgtccggtcaatggtaaaagaaaagtcatataacaaatatataacatggctggaaaaaggagataaatttgataaagcctttgccatagcaatctttctgcctgtagcaccggacgatcttctctgttatatcgcagggctgacaaaaatgacattaaaaagatttacatggattatccttctggggaaaccattgtctattcttatatatagcttagggcttacagggataatggaaattataaaaaacttcatatagggacagggcgtaccgaaaatgggacacccgtgttgtaatttgggacgtgttctttctaaaaggaacacgtcccaaattacatatattgcctgttgacaaatatgtatatagtgtgtatattatatatatacaataaaactatatatatacacttcatgaaatggagaggattatgaacataataatcagtaattcaagcggtaagcccatctatgagcagataacgtcgcagatgaagcagatgattatgtcgggtgagctcaggccgggggatgcccttccttctatgcggctgctggcgaaggaactgagaatcagcgtgatcaccacgaaaagggcatatgaagatctggagcgggatgggtttatctgcacacaagtgggaaaaggaagctatgtcgcagataccaatcaggatatcgtcagagaagaacagctaaaggcaattgaagaatacctggagcaggcagttgagaaagcaaaagtaagcgggatttcttatgatgaaataatagaaatgctgcggatgatctatgaggaggtatagaaaatggagacagcaatcaggttagaaaatgtagtgaaaaagtaccccaaattcaccttggatcagattaatttggagctcccgaaggggtgcattatgggactcgtaggggaaaacggcgcaggtaaaactacgctgattaagtgtattttaggtttgataagtttgtcagacggcaggatatataaggatgaaaaagtcatttctgagaaagaaattgagtggaaaaatgatgtgggagtagtgatgtccggttccagttttcccggtaatttgaatgcaaaacaaattaataaaattatggagaacatatactcacggtgggataaaaacatcttttttgactatctgaagcaatttcacatagatgaaaacaagtatacgaaagactattctaccggaatggccatgaaacttcagattgccgtggctttttcccacaatgccaagcttctgctgctggatgaggcaaccagcggcctggatcctgtggtgagggatgagatcctggaaattctgcagaactttattcaggacgaggaatgtactgtacttttttcctctcacattaccagcgatttagagaaagtggctgactatattacctttctccacaagggaaaattaattttcagtgagaacaaagatgagcttctctacaattatggagtggttcgatgctcaaaggaggattacaaacgcatcgctcctgaacacgtgatagggctgaggaaaaaccaattcggatatgaagtgatggtggataacaggattgatatatccaggcaaaacagggactgggtagtggacacaactacgttagaggaaattattttattccagattaagggggacgtactatgaagggattagttttaaaagatttgtacagtgtaaaaaaatatatgaggcaatacgtactattctttgctgtttttacagttgtgggaattatgcttaaaatgcctgcttatataggattcctgggggccttttatggcatgagcctgtttatcagcacgtttaacaccgatgagtttttccattgggaagcatatgtgcttacaggtcctttgtctagacgggatttggtaaaagggaaatatgtactgatgattctcctaatggggagtgcagcggttattgctattttgggtgaactggcagtgtgtgtgattacaaaattatccgtaacagaaaattttgcagctggtctgtctatgatgatttatattttcttaatgatgtcagtggtaatacctttgatttataaatttggcagcgaaaaagccaggacttccatgatacttattttcgttgttccggtcgtgtctgtggctcttatcggcaagattgctggaacagaaaatgtgaatgaatttttggagcatatttcctggcccgcagtggctgtgggagcagtgatcctatgcatcatggccctgatcctttcctatattatttcactaaaaattatagaaaagaaggaattttagaattttattttggcacttttccagtagatttttttgtcagattatgagaaaatattatcaagtgcgatgttaaatactaacgagccttaagtctattctatacttgaaaggagttttaaaatgatttattcacacgaagtagaaatgatgtgcccggtggcacagggcgtgaaccacggcgcagctccaattccggaagaagcaaaatgggtaaaagcgaaagaaattaaagatatttcaggtttaacacatggtgtgggctggtgtgctcctcagcagggaacctgcaagttaactttaaatgttaaggaaggtattatccaggaagcattggttgagaccatcggatgttcaggtatgactcactccgcagctatggcatctgagattttaccgggaagaaccattttggaagctctgaatacagacctggtttgtgatgctatcaacaccgcaatgagagaattattcttacagattgtgtacggaagatctcagagtgctttctctgaagacggactccctgtaggcgcaggtctggaggacttaggaaaaggcttaagatctcaggttggtactatgtatggaacccttgcaaagggccctcgctatctggaaatgacagacggttacgttacaggtatcgctttaaatgaagatgatgaaatcattggctacaaatttgtcagctttggaaagatgatggacttcatcaaggctggagacgatgccaacactgcatttgaaaaagctcagggacagtatggccgtgtagatgacgcagtgaaaattattgacccaagaaaagagtaatcagatactctttaaagtctgccgtagaaagaataggaggataaattaatggctttatttgaatcatatgaaagaagagagaaacaaattcttgctgtattaaatcagtatggaattaattctatcgaagaagctgcagaagttacaaaagcagctggtttagatgtatataacatggtagagggtattcagccaatctgctttgagaatgcaaaatgggcttacaccgtaggtgcagcgattgcaataaaaaaaggctgcagaagagcagcagatgcagcagcagcaatcggtgaagggcttcagtctttctgtatcccgggttctgtagcagatcagcgtaaggttggtctgggacacggcaatttgggtaagatgcttctggaagaggataccaagtgctttgctttcttagcaggacatgaatctttcgctgcagcggaaggtgccatcggtatcgctgaaaaagccaataaagtacgcaaagagccccttcgtgttatcttaaatggtcttggtaaagatgccgctcagattattgccagaatcaatggatttacatatgtagagacagagatggattatcatacaggcgaagtgaaggaagtattcagaaaagcatattccacaggacttcgcgcaaaagttaattgctatggtgctaacgatgtagttgagggtgttgctattatgcacaaggaaggtgttgacgtatctattacaggtaactccaccaatccaaccagattccagcacccggttgcaggtacttacaagaaggaatgcattgagatgggcaaaaaatacttctccgtagcatccggcggcggcacaggaagaacacttcatcctgacaatatggctgcaggtcctgcttcttatggtatgacggataccatgggacgtatgcactcagacgcacagtttgccggttcctcttccgttcctgctcatgttgagatgatgggacttattggagctggtaataaccctatggttggaatgacagtggccgtggcagtagctgttgaagaagctgcgaaagctgggaagttctaaagtaattggattattaagaggctattttaaaaccgcactaaccttttatggttggtgcggtttttgagactgtgaatatgattgttatacttgatagtccagagatttattcagaatatgcgccatattcttatgtggaggacatgaaacaatttatagatatggttagtcaaatgaaccgtgtggcataggtgattaaaaaatattatggagctgtcagtagtgcacagcagggaaattctaaaaaattgcagattgcagagattaaaaatggccgctatcaaaagcggccatttttaatctcttttcttttttattctgccttcacctcataggatgcactcttatatgtcaccacatccccggtaggttcatcgtccgcgtactgcatcacttcaaccttatgtgtccctacagcaattgcatcgtcccccagatctacagaataggaggaatcagacaactgttcctgggcggctaacagtccgtcaacgtagatataggactgtttggaaccgtcgaatccttttgtgtttacctcaatcataatgacggcagcgccttccttggtatagatgacaggcaccttgccgtcctcggaggtttcgtctgcacaggcaatatacatggtaccgtccccagtgtccttatagtcgccggcaggcatctcttctttgggctgctcagcaggtcctgtttctgactgcttgacattatcgtctgcagtgtcctgatcagcgggagaggcgggagtttgttcttcggcagactcctgtttattatctttggatttggtgtctcctccgctgcagcccagcatacctatggaaacggatacacacatcagaagtattacaagttttttcttcattcttttttcctcatttcttttgaattttatgataaccgaagtatgagagggtgttcataaagatattcccattcggctaatgattatgtaaacagcagttcatatcaatatttgtacattcgatttcatatgtaaatgataaacatattttgtgaaacagcagttaccttttatgctccccccttattcaaactggacacgtaagtgcctgtatttacagtatatgggaaacggagaaaaaagtaaatgcacaaaaattacgaaagaatgcctgttttcaattaaaaattatacgatgctcagggagtatacatctcagacagatactatagtctttgttgggacagttccatttcgtatacgtcagggaaaacgatttctcagcacataatataagagactgctgtccgtcagcagtctcttacacagataccgttttttacttaattacaaaagagtcgcagtctgtacattcttttgtagtcgggttagattcatgtgttccgactttaattttattcagtgtacagtagttttcgtcctgggcatggtgtacacaatttttgattgaacattgaatgctttcattgattttcatgataggtcctccttacaatcttcttcattgttacacgcttagtatttgcaaaagagcttaaaaaatacagggaagaaaatgtgaattaaaaaagaggatagctatactgctgaaataagaaaaattttttatgaaaatattagaaatttcgcttcatctcttccataaacaaagagcggttgtcaactgcccgcatggttgccagaatgccgtcaagatgatcgtattcatgctgcagcagctcagagagatctccttccagatgcatagtttgaggcgtccaatccaaatcccaaaaatggatatctgcttttttgtatcgttcaaccttcaccagaagtccgggaaaggacatacagtcatccattactgggaaggtgtctttctctgggaaagtaattgacggatttataaaaacatagggtctgtctgtatacatatagagaagccgtttctgtaccccaatctggggtgccgccaccgccctgcccgcaccgtggatcttacggtagttcatgagagtgtcatggagatcggtgacccatccggggattttgtgtgcctcatcttttttaatctcagtgctgacttcatacagttttggattacctaatttcaaaatatctttaatcatgaaagccgcctccgcattatgtagtaattatgcacggatggagtatacgggattcgaacccgtggcctcaacaatgcgaatgttgcgcgctcccagctgcgctaataccccaaaaaatggaagcaacggggctcgaacccgtggcctctcgcgtgtgaggcgaacgctcatcccagctgagctatgcttccatacttataagtatagcactttgagcggcaaattcaagtgtaaattatggggggatcgcaggaaaaccccggttattctccggggtcatcctcatggtagatacctttatcttttagttcctgtacaattctgtcatagagttctttgggcggtttcatatgatcaatgacaggatcttctttcagttccccttcaatctgttccgcctccttcctgagagcttccgtcaccgtttctggtgacgtttccatcaggcgattgaatagttccaaataatttaatttacccattagattcagcccctttctctattcattgtagtaccatgataaagaaaaaggggctggtaaattttggaaattgctgttgcctggtggattatttgtgggtctgcagaaaggtctcaaattttttctcgctgaagatttcgtttgtcacaaattctccattatagaaaaaactatagtttgtacaaggaccgggggcattctgtgcctgttccagggtctccagcttatgcagccggatagtttttccgtgcagcttagctatttgctgaatcagaggtacatattttgcagtatggggacactggctggaataataaagaaccatgccctgctcttgcgtctttccctgtttggcacagtctttgaagcagggaaggggagcgttttcccggaagggaagatagagcagctcataagagggacaggcggtatccgctgtccggaatcctttgtatttcaggtatttgggatctgacagaaaaggcatctttttagtgctggaaaggacagtgagtccgcacatcccttttattttagcatcactgatacactgctccagcaattgattggcgtagccctgacctttgtactttcctgacacccagaaacaattaatatgcatataccccggggctgcaatgggaaaccatgctttttcggcagggatatactctataaaaactttgccccgtgcatccagctttagaaataccagaccgtctttaaaccgttctgtcatccacttcttctttgaggaaacacagggttctccttttttatctgtaatcgcacagcagatgtgctcctgatcgatgttgtcctgattcaatgtaataaatttcatagcaattcctccgcgttctgggttatattatgggaataacgaaacaattcagggatcggcgtgtgccgcatggatccgggcagacgccatatccctgaatacaaaaatcataacacatgaaagatgacaacagtatgtcctattctgcagaatctgaagtttcttccgccatagaggcagaatcaccggtctgaataacctccccggtatctttattgataaagtttacagtggtgtttatctcttcctccggaacagcattgagtgcctggtaaatgtttcccataagatagaacgtgatggcatagattccctcaaatccaccgaaggagtctgcatctaccttaatatcaaaggtagcaacatcatcactgtaggtgatagagtcaaaggacggacagttttccttgtcagccagcagctcattgatactttcatcaatggattctttcattgaagttaacaattctttgtgggcttctttggtcatcttcatagtaacggaaccgtctgcattctgtgttacttctttcacaccgttttcttcagcctcttctgtcagttcggcaggatcagatccctccagaagagatgccgggatagttacttccacagacagcatattcttttccgcagagagagtaccgctgtcccctccggattctttctctccatcggcctctttggactctgccgtatcagaggcttcttctggctttgaactttcttttgcattgtttttgggtgtgccgcaggcagtaaaggatacggtcagtgaaactgcaagcatcagggcaacgattttctttttcatttttttcctccagtatttactttttgtgattctctgtaacggtaggattgtatcacattttctttgaaaataggaagtttcttatggaaaattaagaaattggaaaaatatagtatcgatttactactatatattgacataatagaaatatagtagtattatactaccatataaaggagctgaggaatatggaaccatactttgagacagaggaggaatttctggagcattataagcagggagattatgagaggccttcggtaactgtggatattcttcttttcactctggatgaggtaaaaaaggaaaagagaaccatggaaaaggaattaaagctgcttcttgtgaagagagggcagcatccttttaaagggtgctgggcactgcccggcggatttgtaggtattgatgaaagccccgaggaggcagcgaaaagggaactgaaggaagagacaagtgtggataacgtgtatctggaacagctgtgtacgtatggacagcctgaaagagatcccagaatgcgggtgatctctattgcctatatcgcacttgccaaaaaggaggatatcttagcgtcggccggagatgacgcccaggaagtggcatggttctctgtgagcaagacaaagatgatggactttgatgcagaccgggaggcatggctgttaaaggtggaaaatgaaagcctgggaattcatatgggatatcaggtggtggagacgaaaaagaaaaacggcgtactggctgctaaagagttcgacatatcattgctgtcctccccaaaagaaaagctggcttttgaccacagcagaattattaatgaatcattggaacgtctccgtggaaaagtaagttatacacccattgcatttaacctgctctcagaagaattcactatgtatgagcttcagtctgcatatgagactctgctgggacgtccggtttggaaatcaaatttcaggaaagagatggatcaatatgtagtggacaccgggaaaatgacagagaagggatataaaggcctgtctctgcggcctgcaaaattattcagatacagacaggaggaatcggaatgaactatttaattgtaattgacatgcagaaggattttgtcagcggtaccttgggatccggggaagccaaagcggtggtgcccgggctcattcggaaaataaaggagtttgggggcgaggtcctctatacccaggatactcacggcagtgcgtatcttttgtcccaggaaggaaagaagcttccggtcagccactgtatcctgggaacggaaggatgggagctgatagatgaaatcaaagaagcggatcccggctgcagggaacgttcttttcaaaaagacacctttggaagtacagaactgatgggctatctgacgaaaaagaaccaggaatccgggataagctccctggagtttgttggagtatgtacggatatctgcgtgatcagcaatgcactcatggctaaagcctttcttccggaggtgcctgtcctggtcgacagcaggtgctgtgcagggacatcgccggagaaccatgagaatgcgctgaaggcaatggcatgctgccagattgagctcaaataagcgtcaggagagctgtgtaggaggaagaaagaatgaagaatttaaccatgctggtagatttttatgagtttacaatggccaacggattttatgttcacgggcataaggatacaaaagcagtatttgagatgttttaccggaagaatccggatcatgggggatatgtcattgccgcaggcttagagcagctgatagactttgtgtctgacatgcattttacagaagaggatattgactatctgagaaaaaagggaatttttgacgaaggatttctggactacttaaaagaattccgattccggggaaccatagaggcggtgccggagggaaccattgtatatccgggaactcctctggtgacggtgacaggcaatgtgatagagtgccagcttctggagactttcttgctgttaaccataaatcaccagtcactgattgccactaaggcaaaccgtatctgcagggcagctggggatggaatggttatggagttcggcgccaggagagcccaggggccggatgccgccgttcttggggcgcgggcggcctatatcggagggtgccatgccacggctactgtgcttgcggatcagatgtatggggtgaatgccataggaaccatggcgcattcctggatacagtttttcagttccgaggaggaggcattccgcgcatatgcaaagacgtatccggatgactgtacgctgctcattgatacctatgatattataaagggagcacagtgcgcggttaaagtggccaaagaggtgctggagcccaagggaaagcgtttaaaaggcgtccgcattgacagcggggatttggcgtatttttccaaaaagctcagagccttgtttgatgagaatgggatggaggactgcaaaatcgtagtttcaaacagcattgatgagtggctgctgaattctatgaaaacccagggagccaggattgactcatacggcatcggggaacgcctgattacggcaaagtcagatccggtattcggcggggtatataagctggtggctgtggaggaagaggggaaactgactccccgcatcaaaatcagtgaaaatgaagaaaagattaccaatcccgggaaaaaagttttatggaggctttttaataaaacatcgggcatcggttatgcagatgtcctgacgctggaggaggagcatctggacgaagggggatctttctatgtaatagatcccaagaagccctggaagcatattctgattgataattctgttgcggtaaggcttcagaagactatctttgaggacgggaaactggtatatgaaaagccccggctggaggatatcagaaagtatgtaaaagatcagatagagaatacggtatgggaagaagaactgcgcctggagaatccccatgtacattatgtggatttgtcagaaaaaatttaccagataaaaagccatatgctacaggaagccgggaaaaaaatgaactagagggaaagggacatgtaactgaaaaattgcatgtccctttttcccaggcaatagtttcagaagttattccgaaaagagggttgaaaatttgagtcaatttcctataatgggtattaaccaaatcggtaaggaggggtgttatggatcaggaaaggcttcggcacctgccggaggagaaaaaggtacagattatgaatgctgcctttgaagtctttgggaacaatgaatataagcgggcatctaccgatctcatagcggccagggccggcatatccaaggggctgttgttctactattttaaaagcaaaaaggaactgtatctgtatttgctttcgtatgccatagaggagtttcgtccccagattctggatgaaaagttttatgccattacggatttttttgaattgcttgcttataccaccaggaaaaaggcggaactccttcataaatttccgtacatcatggagttttctgtgagggcgttctattcctgcaaagaggatgtctctcaggagatgaattcgatgatgaacgatcagattgagagaatgtttaaggaatattttaagaacattgacttgagcaagtttaaagaggatgcggatccgaaccggattcttcatatgctaatctggatggcggacggatatatgcaccagaagatgtttgcctgcatgggcagagataccacaggagttattgaagtggaggatttaatggagcaatttgcacagtggtcagaaatgtttaagaaaattgcgtacaaagaggaatatcagggagagacggacttgtaagagagggggcacgggtatggatgtaattgagattaaccatattacaaaggattatggtcagaaaagaggggtttttgatgtgagcttctctgtgaaacagggggaagtccttggatttttaggacccaatggagcgggaaagacgacaacgatccggcagctgatgggctttatcaaaccggacagcgggagtttgtccatactgggcagggactgcttcagggaggcaggacgaatccaggagtctttgggatatctgccgggagaaatcgcatttatagattccatgagcggcatggaatttatccgttttgtgggaaatatgaagaaaatgaaggatctgggacgtgcaaaagagttaatggagatgtttgagctgaatgcatccggaaaattgaaaaagatgtctaagggaatgaagcagaaaatcgggatcgtgtgtgcttttatgaatcctgccgcagacactttcattttagacgaacctaccggggggctggatccgctgatgcagaaccggtttgtagaactgatactttcagagaaaaaaagaggaaagacgatacttatgtcttcgcatatgtttgaggaaatagaacgcacctgtgacagggccgcaatcatccgtaaagggcagctggtggcggtggaggaaatggaaaagctgaaggaaggacggaagaagattattgaagtaaccttcagggaagcagcgatggcagaagcatttgctgcccaggttcccaaagcatcctatcaggccggagggaaaagagtgactgccgaggtgggaaaaaatctggattcttttataaagaaggccggtgcgtacaccgttgtggatctggaactgcgtacccagagtctggaagaattctttatgcacttttacggagagggggcagaacaatgaatgccacattattcaggaaagagataaagtccaactggatactgctagtgattttcttaggcgtgctcagtgtttattcggtgatgattactatgatgttcgatcccagactgggagacagcctgcgaatgatggcggacagcatgccccaaatgtttgctgcattcgggatggcagatgtgggcacaacattgctggagttcgttacaggttacttatatggaatcctgctgattgcatttcccggagtttatattattatcttgacaaaccggctggtggcaaagtatgtggataacggttccatggcctatcttttggcagttcccgacagacgcctgaagattgtgcttacacaggggatatttttactgctgtctctggtgttcatgaccgcctactgtactgctttaattctggcagtgggggagattctgtttcccggagagatggacacagcaggatttctccgggtaaatgcaggcttgctggggctacttgtgtttttcgcaggagcatgcttctgtgcttcctgtatctgtaatgagtcaaaaaattcctccgccatcagcacggctgttgtggtctactccgttctcgttcagatgatatcccaggtaggagaaaaatttgagactgtaaaatatgccactcctctgacgctgtttgatgtagacggactgagcgccggagacgggaaggcctggatgatggctgccgtcttgtacctggcgggactcctttttatgggggcaggaattgtcaggttctgtaaacgggatcttcccctttaaaggacgtcaggcatatttttgctctgagtgtttgcagttgacagatgccaaaaaatgaaataaggtattatggtaaatgcaaagcaaaggggagacggaccgatgaataagaaagaaatcagtgaaataaagaagctatttacaccagcaaactgtgtgctcacaaggatctgcggctgctatgtggatgctgaaaaaaatcagaggacaaagctgaaggaggcttttctgtccctgccggaggaggaagcattcaaatattttacgatctttaaaaaaggactgtcagggacaatcggcaggaaccttatgaatatggaatttccgctggaccaggagctgggagagggtactcagaaatttcttctgcggctgcgggacagcggacttatggaagaggaacttatagaagagttttatcaaaaggtcatggatacatatctttatccggagaactattatattattctggttcacggagcttatgacgtgccgggacgggcctcagacaacctggatatggaggatgcttctgactatgtctataactttattatgtgcagtatatgtccggttaagctgtctaaaccgggtctgtgctataatactgagacaaaccatattgaaaaccgggttcaggactggatcgtagatgtgccggatacaggctttctttttcccgcgtttaacgatagaaatacagatatacacagcctgctttattacgcgaagaatccggaagtgctgcagacggattttattgaccagtttttggggtgcaggatacctttgagcgctaagacgcagaaggagacctttcaggtgataatcgaggaaaccttagacaggaactgtgattttgagactgttatgaatattcaggagaatctcaatgaattgctggaagagcggaaggaagatccggatccggttaccctgggaaagtatgaggtaaaaaggctgcttgccaacagcggtgtggacaatgaacgtctggaggaattcgactcccactatgaggcggcagcggatgaaaagactagttttgttgcggccaatgtggcaagcgtcagaaattatgagattaagaccccggatgtggtgataaaggtagcaccagacaaggcacagctggtagaacacaagatcatagacggcgtgccgtatattctcatagaggcaacggatcaggtagagattaacggaattgctgtgagaacagcggcggaagaggaacgtgaagagtaacgcgaggcagaggcatccattggagcctctgcacgtaaaaggaagatgtccgcaagcggccgcgccctggcgcgtgagtcctgcttgccggactcttttttaaatgtgaagactgcttagaaaggcacagtgttccatagaatgttcgggagacaaaaggatttcttcccgttcttcggggtatatcctgcatcttgccgctgcatctgtgaagcggcaggagggacaggaatagtaccactggcaggaactgcatttttcgtgaggacgaatgggcgcatcccagaaggtttctatcagccttcggtataaaagataaaagggttcctgcagaagactgcccaccggatgctggtttccctgcaggcaggggatgaggttgcccgaactacccacatagattttgccagacaggcagagatccccgttttttcggccctcatatcgttccagggtacaggggaccagcgaggcttctgagataggggcagaagacagctgtaccgggagtatcctgtatccgttatgcttccagtgttctatggcctgggggtctgctgtttcggggcaatagaccgtaacgtcatggtattttttcttttcagcctgtctgctgccgcagggaaacagcagtatgtgttcccggaacagctgggggtgtgcaggatccagtctgggaagcagaatgctgacgctcacatcttttttcttcagatatctcaggacagcatcaaactctttataaaggagcacattgcctccggtgagcaaaaatgaggaggcaccggcatctgagagcgtgtcaatgatggaaaaccagcgctctgcgggcagatctttgacactgctgtctccctgccggcaggggggacagaaataatctctgcagttgtccccttctatatcgcatctgccggtgagctggagtacggcaatctggattttatagcttttcaaatctctgtgtacctggagaagcgggttgacttccctgagcttatcaatgtaacagggcttatcggaataaaatcccagctgcattttctccagctcgcggtaaaaatcattatcctggatttccttccccttttccgctgtttccagccagctgcattcctgtttttccagaccggtgaattcgccgctggagagattatagagagcgccgcccccaatgcctgtaagaaagatacaatggttataaagatgaaaatacatggataaatcctccttttttcagctcagtacggcaggctgcctgtgatcctgcttcgctcttccagatattcacgggtaaaccggtcaaaggcacagggcgactcctccagacattccgtatacagggtcagcgtgtcttttacacatgcctttttgtctctgcagtaggcggagggcagggacagcgcagtatagtctgccgcctgtgccatacagaggctgcagaacctggttatcctgcagtcgccgcatctgccggcaaaactgttaaactggttaatatatcctgctatccttccatagtccagtccatgctctgcgtctccaatgggaaagtgggagctgatcttttcgcacatatgataggttccgtcaacagctgcaaaaattttttctccggggatgcaggaaccagtatagggaaagaatgagggcctcttttcccccatcaccggatgacaggcaaacatctcataccccgaggagaacagagggagaaggagactgcaccggtgcagcgagacagaccctccttttgcagcctgaaaatattgttcccggagacgggagagctgccggtaaaaacggagcttgtcttccggtgaaaactgccggtaataatcagtttctccgggggataccatggaaagttctgtgatgaacagtttgttttctgtgacaaaagcatccagggcatccaaatccgagagataatccagccggacactgatccccagccggcggtatccggggtgttttttcctgagacgttcgatggcctgaaaagcctgatcaaaactgccgcttccatcctcccgtatccggtttctgtcgtggctgggcttgtctccgtccagactgatgataattccgaaattatgggctgtgagatagtccaggatatcgtcatagagaagaacgccattggtagtgacggtataatttacttcacagtccccgtaaatctggctgcagtaatttaccgtctctttgagcaaaccataattaatcaggggttcacctccctgaaaagagatatttgctttgcggaatggatttttattgcggatcgtccggtagtgtgtcatataatcatccagaacttttcttgcagtcgagaatttcatggaatcactgctgtggtttcttgtgtttttatagtaatccccgtaatagcagtatcggcagcgcaggttacacctctgtgtggtctccagaatcagctgataatacccttttgtgagaaggtaatcctgtacctggccggggagcgcctctggctttttttcggaagccggacacacatgataatctctcacctggccggcgggaaagataaatccgtttttatcgttgtatacataggtgtttcctcgtgcagtagaaaacgtaaagcttttcaattgagctgcatctccttttataaatgtttgtgtggttatcttgaataaggtataccctctgagcgggcgtacggcttgttccgtacgttaaagtatatgtggagagtctggtcttataaccagttttcttttgtaaaagggctggctggaagtaaggttctgcatatactaatatcacaaaaaaaatcaggagttaatcagtatgttttatataaaatcctctgacggaacaaaaatagctgtatacgattaccgctgcggcaaaaaaagagtaaagggaacagttcttctggtgcatggatggcccttgtcccatgaaatctatgaataccagatcggatgtctggtggaatgcggataccgggttgttgctctggatctgaggggctttggaaattcagacacacctgcctgcggatatacttataaccagatggctgaggatatttatcatgtggtgtgcgctctgcatctgaaatgttttacgctggttggattctccatgggaggcgccattgttcttcggtatatgaacagataccgggggtatggggtgaaaaaactgatattattgtctgctgcagctccctcctggacccggcggcctgggtacccctatggtttgaccagggagtatgtagatggattaatccatcaggcctgtacggacagggcggagctggcgtataatttcagtcataagcagctgtttgcaagtccgcagagtgaagcggcaaaggactggtttgaacagattgccctgtctgcttccgggatagggacgaaggaagcagccattgcactgagagatgaggacgggaaaaaggatttaaagagtgtgagagtgcccaccgtgattatccatggggcaaaggatgaggtggtgtctaatgatctggctttgcttcagcacaagggaatcccatgttccaaattatatacactggagaacagcgggcatggaattatgtatgatgaactggagatatttaattgcatatttatggatgctgtagaaggcagagtctgaatataaggagaaaaagcggctgtatgccgctttttccttgacagacagctgaccgaatgttacagtataactgtaatacatatgttatacagtagagaggtaaaaagatggaatttagaactgacattccgatttaccgccagatagcaaccagtatcaaagaacagatagcaagcggctgtctgcatcccggagacaagcttttgtctgtgagggaatactctgttttttttgaggtttctgcattaactatccagcgggctatgcagctgctggatggggagggcattatatattcccagaaaggtgtgggcagctttgtaaaaaacggagccggagaaattgttaagaaagatatggtggcccgtctggtaaaagaatttgtaaccagtatgaaaaatacaggagcttcaaaggatgagattatgaagcttgttgagaaggaggcaggtgagcaggaacatgatggaacttgaacgtgtaagtaaacgctgcggcgatattcaggttattgagaatgtaagcgttgcagtacctgaagggcagatcatcggattggtcggagcgaatggtgtgggaaagacaactttgttaaagctgctggccggttttcttcacccggatgaaggaagaatccgtatggagccgggaaagatttcctatttgctgagggaacaggatatgtacgcctggatgaaagttaaggacgcagtctgctattatgccgacttttatccggatttcagaatggagcaggcaatcagccttttggaggaggcgggaatagaactgcaccggaaagtaaaaaggttatcggatggaaataaacaaaggctctgtctgattctcgcagtctccagacaggtgccttattatcttctggatgaacctgtgaaaagtacggatcctaactttaagaaggattttaagaaatatctgctgaggaatcttccggagaatgctactgtgattctcgccacccatttgctgaaggaccttgagactctgttcgatacggttctggtgatgggaaaccgtcggataaaaatgatagaagcagagcagatacgggagaactataatatatcagtaggagagtactgcgccagagagatgaacacaatgaatgcataaggggaggtggagatatgctgaaatgtatgaagtgggagatgagacggatcttttatcagctcaggtggattttgctgacagctgctgtgactggcggcatctgctgggtaagatattatgacccggccggtgcgctgaaaggacagtttgattctcttttctggatactgaacgttactgtatcctgctgcgccatctgcctgaggctttatccctggtataatatgctgcagtcctttaccggagacgcttacataatggaaaaatcaagaaacatttcctttgccaggctgctgtgtgcaaagcttcccggatatctgtgtgtgcttatgctatgctatggtctgcagatgaccaggggaatgatgctgttgggacagaaccctgagatggtcctggagggatctgccgccagcatcatatggatggacgctttgagcttttttgcagaacctgtgctgcttctgtgggtttttctggagctgttcaggaagctgagacgcggaaatgaatttttagcactggttctctttctcagtgcggacagagtgctgatacggatgccatttcaaaactatacaggcatcatagaattggccatcgccgccgtttttttctggcggattgcctggctggcagatcactgttatgaaccggcatagtgtaagttcctttccgggactggatagtaaatcacgcagagatttgcgtgatttactcatgcggtgggaggaaaaagtacctatactgtatctgtacaggaaaggggcgaaatatgatgcaagtagtattaaaagcaaaagatgtgacgaaagcttataagcgccaggggaatccggcgctgaaccgggtttcttttgaggcaaaggagggggaattcctgggaattatgggggcttcggggtccggaaagactacactgctgaatgtactgtctaccatagacaggcctgaccaaggggatatttttattcataatatcaacgttcccaggctgaatcaggcccaggccgcagacttcaggaaacgtaatctgggcttcatttttcaggagtactttctgttggacagtctgacggtgagagagaacattgcagttcccctaacgttgctgcactggcctgcaaaggagatagaaaaggaaacagaagcgctggcagaggcttttgaaatcagctcccagctggagaagtatcccagtgagctgtccggagggcagtgccagagagctgcagcagcccgggctatggtaaagcgtcccccgcttatctttgcagacgaacctacgggtgctttggattccgggtcatccagggagctgatgactgctctggcaaacatgaatcagaggtcaggaaccacgatcctaatggttacgcatgacccctatgcggccagctatacggacagaatcctttattttaaagacgggtgcatcagtggggcgctggagagaaacggacaggaacggggagatttttatgaatgtatcctgcgggagactgcccgtcaggatagaaaacgatagggggtacggggatgaaagtatcttctatggctataaaaaatgtaaagcgtaattcttctttttattctctgtactttttctctgtggcacttgttctctcagtttttttctgttttgtctcattctctatgaatgaggtaatcctggaaaaaatatcctcagacggccgtgtggagacaatgtgcagtgcggtggctgtttttgtgatttcctttgtggttttttatatgtcttacgccaatcggttttttatgaggcgcaggatgaaagaactgggaatatatgctctgcttggatacaccaaaacacgtatgctctgtctccttaccctggagaattcgctgatctgtgccggaggggtctgtgcggcacttccggcggggggattgctgcacaaaggagcggtggggggaattacggcagttctgggactgactgtagacagcagcaggatccccctgatcaatctgagagcggcggcgttttgtctgcttacggttctggctgttcttgcagcacttacactgtcgaatgcgagactgctgtggaggtctgcgcttatggaaactatccgtatggagcgcagaacggaaaagcctttcaggctccgcccggctgccggtgtgcttggtgtgctgctgctgtttgcgggatatgggctggctttggatatggggagaggaaaggcttccttctggaataggattgggttttcccccattgcacttcttactatgctgcttgtggtgattggaacggcactgtttatcctggcttttcttccctgtgcgtgtataaaattcagggaaaggaaaaccattttttacagagaaagtacaataattactgtgccaaagttcatgtcccgcctgcgcacgaatgcaaagtcattgatccttttgattcttctgtcagggggaactcttgcagtgtttggggcgacggttctgtctgtgtggtacccactggcgtccctggagcggattatcccctcttcgatggaattcagggttttggacagcggggagaaaaccgcggcgataaaggcgctggataagactttggggagcggcggatacgaattttgtgagactacagttaaaaaagtgaaaggggcttcagaacgcctgcccgtggaatatggcatcagtgcggataagggaagggagccagggtttgaatgcatccgtgagtctgcttatggttctctgagaaggctgcagggaaaaaggaataatctcccttctctgagggagaatgaatgtattctcataaaataccgtccggatccctcaaaagtggatatcggagctgcctatgcactggaaacaggcggaggaaaaacctgcaaggttacagtaaaggataccagcctggagaatcccataggattcgccaacagtgtgggtactttggttgtcactgacgaggttttcgagaagctttcagagggaccggcggaagcctatacagttatgagcttcgggggcaaagggctgcggactgagaaacgggcgtatgaggcgctgagacctatcttgtcagaaaatccatattttgtgagcgcctttcagcgcaagtcagaactgataaagctgaatagttctaccttgctcttaatcagctttgcggcagtgatttttctgattgcaacgggtagtatcctgtattttcagacggtctcctctgcggtttacgacagaccggactatgaaataatgggcaaaatggggtataatcatgatatgataaggagagcagtgcgcaggcaggtacggatttattttctggtgccttttcttatgggaactctgcacagtgtatttgcgctcttttgttataaatcagctttgatggatgaccttctggggaaaagcagtgcggtgctggttccgctccttttctctataggaagctactccctgatttatctgatatactaccagatgactaagaaggcttgctatgggattattctgaactggaaaggacggtgaatcaaaaatggaaaaacggtatctggtcaggcaggggattctggttatcagtcaggcaggtgcggttgtaattctctgccgaatggcggtggatggaagtcagtcaggtctggcaaatacgtttcccctgatacttatatccctgctgttccttgatgccgcttatctctcactcaagaatctgaacaacagccgcatattgacgcagttctcttgtctgctgctccttgcggcgtggcagtttttgttttctctgtttgggcgggatggaattctgcacgggattttttatctattgataccgataaccgtactgcagaccatagatttcttacagacgtttctgttccaggactcatcctatcgggggcagaaatcatttttgtttcttttgagaattacctgctgttgttccgcagccgcatatttcttatccatgcaggctttttctctcgcccttcttctgcagtctgcagctgcacttggggcagggaccaccctgatgctgatgcaccgtaagaggattctgttctttcttaagagccagaagaaggtgctgatccgatcttttttgtttgtagttctaccatttacctgttacattctggtttttattgatcgggcccgttatctggagaatatgggaagctacttcataattatgacctcatttgtcagcgtgcacagtattgtaaatgggagaggggctgatgctcccatttattttgccttaaggggaagggaggctgtccttattctgtgcctcgccgccggaacttcggggatggttggatatctcacagggcttgggacggtgggagctgttatggttttccatgtcttatctctgctggctcaatgctttcaaatccttttgtatcacagaacagtatgcaggggagtgggaaattattatgggtattccttgtcacagctcaaaagagaagagagactgcgggaggatttttctaattatcttcatgatgagattctgcaggatttgctctctattaagaatctggcaggcaaggcagaaagaccggagattaaaaaacttatcgctgagacagcagatggactgaaccggtccattcgggcaaggatggagagttaccgccccaccctgttgagaagcctgacgttaaaagaaaatatgcagaatatgctggatacactttcggctgattatggggagaaggtcggaaaaatagatttcatctgtgaggagaatatttttctcgtggagccgtataacgttatggtataccgtatcctgcgggagctggttacaaatgccctgaaacatgcacaggcagctgaggtaatagctgagctgtcacagcaaaagggaaagatacttctggaggttacggacaatgggacagggtttgaacaagaagaatacaggcatcagagccatagggggctgaactccattttggagcaggtaagtatgctggggggaactatgcagatctggtccgggaaaggagcgggtacacggataaccattgccatggaaatgaaaggggaggattcgtatcaaagttttattggtggatgatcacgctctttttgcaaagagcctttccattgtattagaagattttcctgagattcagagcttttcctgcgctgcggcagacggcgggcttatcgggcgtgtgaaaacggaacagccggatattttgctgatggatattaatcttgggaaaatgaatgaagaggacgggcttcttttagcaggacatatcctggaagcggtgccctggcagaagatagttatgctgtcagggtatgacctgccggtgtatcgcagggaggccagacggctgggggctaaggggtttgtgaataagaatgtggaaccggaagagcttgtggctgtactgaaaagagtgcaccggggaatggtttgttttccggcagacacctggatgacggaagacttgacagagacagaaaaaagagtgctggaattactggcggcaggtacaaagcgaaaggatatcgcacggcagctgtacagcagcgagcgcacggtctcaaatcatctgcagcatatctttgaaaagctgggggtctcatctgctgttgaggctgttacgaaggccattcagatgggatatattgtcccggactttacagaatatgaaggatagaccggaggcaggggctgctctccggtctgtaatattcagatatcgatagatgcaatctcggggatatcctttagcagccctataacgtcttcaacctcgtagttaattggaaatctcacaaaaagcttcagttccagcatctgtccccccactctggtggctttcatattcgatatttttatctctctgctggtgaaagcgcgatctagcaggctgttgacatcctgatcctcctgaatatgaatggtgatttgttcaatggcaggagattttacaattttcagattccggtgaaagatgtactgcatcagaagaatgataagggttgatgcaactcccataatgtacataccggcaccgaaggccattccgatgcccacagttgcccagattcctgcagccgtggtgaggccgcttacgttcatgtttcttgtaaaaataacgctggcacccagaaaccctatggcagttaccacgccggctgcgattcgtgagggatccagacggatggtgtcagagagaacatcataaaaggcatatttggataaaatcatcataagagcagaggccagagatacaatggtatgggttctgattcctgcaattttcagacggctttcccgctcatatccgatgattccgccgcagatggatgcgcccagcaggcgtagaagaaagattccctgttccataaaataagcctgcaaaatatcacctccttgggttgtatagaactattatatggcagagtgcaggggaaagcaaataaatcattggtgtaatatcttacaagaaaaataatcctgccggtggtagactgatgaaaacagagagaggagacagattatgccgaatatagaagagcaaagaagagtatattatgactttgagctggaattagaagcgtacaatctgaaagggattgtgcagaaatttccaaatcattttcatgattactatgttataggatttgtggagggaggcaggcgtcacctgtggtgcagaggtaaagagtatgaagttgcggccggggatctgcttttgtttaatcccagagataatcactgctgcgggcctgtaaacggggagaacctggattaccgggcagttaatataaagccggaaataatggaacaggcggtgcaggagattaccggaaaaaaatatttgcctcactttgaccgcagcgtggtgtatcagagtgaaacggccccttctgtcaatacgctgtatcagagtattgtggagaaggctcccaagatggagagggaggagaacctattttttctgctggaacaggtaattggagagtatacaacacccatagacgagattgctgttccggaacccaaccctcagattcagatgctctgtgaatatatggaaaaacatttttatgaaaatataaccctggacgaacttttatctatgaccagcttcgggaaatcctatcttctgcggacctttaccaaagagaccggcgtgtctccttaccggtacctgcagaatgtgcggttaaaacaagccaaaaagcttttggagcagggggagacaccagtggatgtttcaggtatgactgggttttctgatcagagccactttacaaacttctttaaggagtttataggactgacaccgaaacagtatcagagaatctttcagcagccggcaggacccggctctgcagcaaaggagtaatagaatggaaaagcaaactactgtccggggccatgccgctgcgggcgtaacaatactgatctggggcaccacctttatatccacaaaggtattattaagggagtttacgcctatagaaatattatttatacgtttcctgatgggatatcttgtgctgtggctggtatatcccagaaagcttgtcctggcctccaggagacaggagtggtatttcgctgcagcggggctgaccgggattgccttatattatctgttggaaaatatagcccttacgtataccctggcatctaatgttggtgttattatatccattgccccgttttttactgctgtattttcctggatatttctggggggagacagaccgggaaaacgctttctgtccggttttgtcattgccatgggaggaatagccctgatcagcttcagcagtgaggcaaagctcgctatcaatcctctgggagatatactggcagtggcggctgcagttgtgtgggcggcatactctaccataacaaagaaagtcagcgcctttggctatcatgtgatacaggcaacccggcgcacatttttttacgggctgattttcatgatccccgttattctggcaagtgattttaagataagtctgggacaggtgacccagctgaaaaatatggggaatctgctgttcctgggagttggggcgtctgccatatgctttgtaacctggaatttcggggtgaaaatcctggggccggtcaaaaccagtgtgtatatctatatggttccggtaattacagcggtaacctcggcaattatattaggggagaggataccgggtgcatccgttttagggatacttatgacactggcgggattgctgttgtcagagggaagaagtaagaagatagagataggaagtgaaaaagggacagggctttctgaatcggggacaccctgagttgatttggggacgtgttctttttaaaaagaacacgtccccaaatttacatttactgccatttccagtctctgatttccggcagatcctggccatattcggcaatatattgtttatgctctactaacttatccctcattttctgtaccagataggaaccccggttgcccagctggggcaggtgctgaatgacatcctgtaccaggtggaagcggtcaatttcgttctgtacacgcatatcgaagggggtggtgatagtcccctcttcctgatatccgtgaacatacagattccggttgtgccggtggtaggtgagctcatggatcagggtcggatatccgtggaagttaaatatgatgggtttatctttggtaaatagtgcatcgtagtctgcatcgcttaagccgtggggatgcttggactggggctccagcttcattaggtctacgatgtttattacacggattttaatttccggcattgcttctcttaggatggttactgctgccagggtttcaagggttggggtatccccgcagcaggccatgactacgtcgggctcttcgccctgatcgctgctggcccactcccagatgccgattccctgggtacagtgttttactgcctgttccatagtaagccactgcgtgctgggatgcttggaggtaaccataacattcacgtaatttttacttctgatgcagtggtcaaagcaggagagcagacagttggtgtcaggcggaaggtataagcgcactacatctgcctttttgttggccacatgatccaggaatccgggatcctgatgggtaaatccattatggtcctgctgccatacatttgagcttaagatgaagttcagggaggcgattttctgccgccagggaagctctgaggttaccttcagccattttgcgtgctggctgaacatagaatctacgatccggataaatgcttcgtagctggcaaagaagccgtggcgtcccgtgagaaggtagccttccagccatccctcacacatatgctcgcttaacatggagtccatgacccgtccgtcatgggaaaggaattcatcgttatctttcagatccccgttccagtcacggtttgtaacctcaaataccttgcccaggcggttggacatggtctcgtcaggaccaaagatacggaaattgcggcttttctcatttagtttaaaaatgtctcttacgaatccgcccagttcaatcatatcctgtgcttttactgcgcccggagctggaacgtcaaggccgtagctgcggaaatccggaaggcggaggtcacggagcagcagtcccccgtttgcgtggggattcgcccccatacgccgctcgccctttggcgccagttcttccagttccggaatcaggcggccgttttcgtcaaataattcttccgggtgatagcttaaaagccattctttcagaagctccagatgctctggctgttccatggtcatgggaacctgatgagcacggaaagtaccctcgatctcgttgccgtccacaatcttcggtccggtccatccctttggtgtgcggagaattatcataggccacttgggacgggtggaatcattgttttcccttgcattaatctgtatctctttgatttcttcaattaccgcatccagcgtctcggccatgaggcggtgcatggtcattgggtcatcgccttctacgaagtatggtttccatccgcagccttcaaagaatttttccagctcttcatgggagatgcgggagaaaatggtggggttgctgatcttatatccattcagatgcataataggaagtacggcaccgtcggtcacagggtttaaaaatttattggaatgccaggcggtagccagaggaccggtctctgcctcaccgtcacctaccacgcaggtggtgataagctccgggttatcgaatactgagccgaatgcatgagcgagagaatacccaagctcgccgccctcattgatagatcccggggtttccggggctacatggctggagattccgccggggaaagaaaattgtttgaataattttttcataccctccacatcacggctgatgttaggatatacttcgctgtatgtaccttccaggtaagtattggccaccataaagtttcccccgtgtcccggccctgagatatagatcatgtccagattgtagcgcttaatcacgcggtttaagtgtacatagataaagttctggcctggtacggttccccagtggcctacgatctttttctttacatgctccatggtaagaggctcacgcagcagcggattgtcaagcaaatagagttgtccggcggaaagataattgtctgctctccagtaggcatccatcttctgaagcagctcatcacttaaaggctgcttttccagacaggtattcgttgtttctggcatggtaatactcctttcgtaaatcatcttaataaagtgtttattttttaacaaacatgagtatagtacttgttgacatgtaacacaacttgtttttgaagaaagttatagaaatagttaagccttaccagcggttattcatacaggaataagccttatattcccataacaaaggggttttactatgaggtacgtctcacggcaagacaataaggctcctggaatctgctgaaatagaagggaaagaagtggaagaatgatacaagttagatacatatcatacaagaacttgagacactgggatgtgaagtggtctgaaccagatttaaaaagtggtctaaaacagctgcatgaaacataaaaatacagggacttggtaaagttttgcacacaagtggagaagggcgatgaatgtatgaaagaagtgaacattgttttccggaatccggaggaagtacaggaattcataaccattgcatcaaaatatccgtataatatggatatgaaacggggggcatatatgatagatgcgaaatccattctcggtattctgagtcttggagtagggcagaggatgaagctccagatcctggaggataactgtgaggagctggtatattgcatcagaaaattctgtaccacctgacgacagacagcgatgagttttatgaatcaaagatgccgcagcacaggcctgtatgactgtactgcggcatccttttatatgggcagattctttattattttatccagcgcctcataaaaccctgcaatctgcaatccgtcaaccagggcgtgatgacagagcacagagactgggatcacagtctcttcatgaaggacagagtatctgccccatgtaatccttggattgctgtcggccggcatgggaacaggctgaataaaagaagtataggaaaaccatggaagggtggatataaaaatcagttcattcccgtcttcctcattatcctccacagatcttacctccttcgcctgattctgttctgaaacagcatagggcagatactcggagaaaggcatattgctgtcaagggtgcagtagcagtaggtgccgtcctccaaagctacggtgtgggaagttctgcagttttcatattctataatctggtctccggaaattctctgacgaaattctggtatctcgttggctgcttttgaaatacagtagcaaaaggtcagaaaaaatgggagctttttttcttttatcttctttaaaaagtctgtaattgtcacattaacagtgactcccacataggggtaggccagactgttaaagtagtcaaaatgcttttttcttttataagtattcatgtctagatattgatatttcataataatttatcccttcgaatgtttgtaataatccaaaactgcctgagctgtgtgattatcatatactattttgtattatataggatacaaaaaacgcatgtcaatatatatcatagtcctattcttcctgcgattgacaattattgcctgaaatagtatgataaatctataaatttacgtaaaaacgggaatgggagaaggaagaatgggtgttacaattaaagaaatagcagaggaagcaggcgtctccattgctacggtgtcccacgcgctgaataaaacccgctatgtcagccctgagatatccgacagggtgctggccattgcacggaaaaagggatataaggcaaagcatggggtgagtgaaaaaacccggaagtataaattaggaaaaatgtccgagatagctctggtgatacccaacaccttcagcgtggtgtatacacgtctgatcgcggttctctccaagctggtggatgaagagggctacacgctgtccatatacctttctgacggggaggcggaacaggaacggcatattctaaatgagattatatccaaccgcagaatcgccggggtcatactctgtccggcagattcgggaaaaaaacagtatcagaagctgatgaactgcggcaggccttttgtatgtctggagcgtatgattgaaggggaggaggcagacgcggttatctctgataatgtacaggggctgaggaccggcacagagcacctgattaaatgcggtcatgagagaatcgcattgcttttggaagacaaaactctgagtacagtaaaaggcagaagagaaggctatctgcaggctttaagagaatatgatgttccctgcgacgaagagctcatcgcctgtgttggcctggaggacggggaagaggcaaaggagtccatcaaagcatttatcaaaaaaatgtcgcccactgcgattctggccggaggcaacacgctgacgttaagatgcctgaaggccatgggagagatgggactggagtgcccaaaggatatctccatcgtggggtttggagatgacaaatggtgcgagctcataaccccggcgctgactaccctgatacaggatacggaggagattggaagaaagacggttcaccttttgctcaataaaatagaaggtgttacccaggaaaggtacgcggcacagaaaatcgtagttcctatggagttatctgtacgcaaatccactttgaacattgcccggggtccctttggagaaaaagtggtgtatccggaggaaaatttcctttcggaggaagagcttgaagtcctgaaaaacgggaactacacggtaggcatttcctttcattatacaggaaatgaatggacgaggcttcacgaaaaggcaatcaaagataccctgaacaatatgggggtccgggtactttccgtgacagatgccaattttgatccggatctgcagaatacacagctggagggcctgataatgcagcatccggatgcaattatcgccgtacccacagatgaggtgaaaacggcagcaaagtttaaggagctggccgggcagacgaagcttatcctgataaacaatatgccaaacagcctggggaaggatgaatacagctgctggctgtcggtcaatgaacgggagaacggccagaatgcagccaggatcctgagagaacattttcaggggcaggaaaatgtgaaggtgggaatgctgatccacggggcgcccttttttgctaccaagcagagagatttttttgccgagcagacattccttgaggacggctcgaatatccgggtggtatccaaacggagcttttatcagattgacaatgcctatgaggtctgccggcggatgatacaggatcatccggacattcaggggctctatatcacctgggatcgcccggcgcttcaggccatccgggctctggatgaattgggccgggaggatatcgccataaccacgacggatctggactatgagattgcagcctgcctggcaaagggcagatatgtggtgggactgagctcccagaggccttacgatcagggaattgcggtggcaacggcaacggcaagagcactgttgggcaaatgtgaacataaatgcatcggagtgcctccctatacggttatggccggcaatctggacaaggcatggaaggaaattcttaagacaaagatgccggaattttagtcagcaacgccccgcaagcagggggtatgcttcttggtcatgagcggaagcgctgtgattatgctgcagacaagcgatggttttgaagagatcagaaccgtcgctttttttgcgcaaaaacataatttacgtaaaaatacataaaaaatagaaagggtacgtaaaaaagaatccagaaaagcgggtaaaatacgagaaagaattgacaatttggctaaaaaatatgataattaaatcacgtaatagtaaaaaatacgataaaatagttaaaaaggagaaagcctatgaaggtaacactgcaggagattgccgaggaagtcggggtttccattgcaaccgtttcctttgcgctgaacaggaccagatatgtaagtcctgagctagtacaaagaatagaagaagttgccagggaaaaagggtatcatagcaaacgggaaaaacagggaaagatgcgtaggggcagactgtcggagattgcgctggtaataccaagtcttgacagcagcttttatacccatgtgatacccgcagtgtccaggaaagcgcgggagcgcgggtatatgatggcagtttatgtatctgacaatgacagagaaagggagaagcatattctggacgggattatgagcagccggagagttgcaggggtgatcctttccccctcctgtgaggatgagaaggcttacagcggcatcctttcctatggaattcccctggtttttattgagcggatgctttccggggaaacagcggacagcgtcatatccgataatgcagagggaatacgaagagctgcggagtatctaatcaagtgcggtcatgagaaaatcgttcttcttttggaaaaacgtcacctgtcgtcggtggacgagcgaaaaaaggggtatgacatggcgctgaatcagtacggcctttctgacagaggagatatggtggttggcgttgtgctgcaggagaaagacagcactatggaaacaattgcaaaggtactgcgggagaagagagcgactgcagtactggcgggcggaaatgtgctcactctttatctgctggaggttatctcaaagttaggaatcaactgtccggaagagctttctgtgattggatttggagacggagactggtgcggattggtgaaacctccccttaccgtgctgaagcaggatattgataagattgctgaggaaacagtggcgtacataacagaagaaaaaggagaaaaggagagcgaacgggaaaaaaagatcaaacggattcctatggaattctgtatcaggaattccgtgcagaatattgcgagaggacctttcggcgagagagcggtatatccggaggaaattgtgctgtcggaggaggacgaaaggctgctcaagagcggaaattaccgggtggcactggcatttcactacagcggcgacgagtggacgtcgcttcatgaaaaggccatattggagacgctcagcggatatgggattcatgtactgacggtcacggatgcccactttgatccggaattgcagaaaactcagctggaagggattatgatgcagaagccggacgcggtgatagcggtacctgttgacgaggaaaaaacagccggtatttttttggaggttgcaaaaaagacgagattgatattgattaacagtatgccgagaagcctgaaaagggaggattatgcctgttggatctcggtaaatgagagagaaaacgggcaaaatgctgccaggatcctgggggatcattttataggaagggataacgtaaagatagggctgctggtgcatggggcggagtattttgcaacgcggcagagagacttttttgcagaagagactcttcgggatcagtatcctgccatagagattgtgaataaaaaaagctttggctgtatagagaatgcgtatgaggcttgccggaggatgatggaggagacaccggagatagaaggactctatgtcacctgggagcgtccggccctggaggccatcagggcgctgaaggatctgaggagaagggatgtagtaatatccactaccgatctggattatgagattgcatcttacatggcaaaaggggaaatggtaatcgggctcagttcccagcggccttatgatcagggggtggttgccgcagtggcggcggcaaaggctcttctgggaagatgtgacagcaaatgcataggagttcccccttatcgggtggaagcagaaaagctggaaagggcatggaaggatctgataaaaacgaaaatgccgattttagttaaaaaataaaagaaaaaacattaaaatttacgtaaaaatcgttataaaataaactatatggtattttaaacaaaaatacgttgacctcatagggggtgcatgctataatttacctgtatttaagaaaaaataaataaaaaattggtaaaaatgattgtgcaatcaaagaaaaaaagaaactattatgtatttaactaaaatgtggaaggaaggatttcatgttagctgcaaaattaccgtgtaaagaaaccataaaagttgtggaggagcccattcccgtaccgaaaaagggagaggtattgattcggatgaaggcgtcagccctgtgcagaagcgatttgcacagatatcatggggtggctttgtttgatgaggatgacaaagaagcgaatattactccgggacacgaaccctgcgggattgtggaggagctgggagagggcgtaacaaaagtaaaaaaaggcgatcgggtggccatttacctaggactgggatgcgggacttgtccggactgcctgcgcggggatatcatgctgtgtcccgagtttcggtgtattggatttgccgttaacggtgcacatgcagattatatgacaattccggaagagaattgtctgctgcttccggaaggaatggattttattacaggggctctggctacggatgtgggcggtacgctgtacacagcgtgcaaaaagattgagctaaacgggacaaaaacggtagtgatcatcggatgcggccctatgggaagcggaggaatccttatggcaaaaggattcggcgcaagagtgattgctgtggatacagacgaagaacggctgcagacagctctggagctgggagcagattacataataaatccctgtaacacagatggcccggcgagagtcagagaactgacagaaggcctgggagcagatgctgctatcgtgactgcaggaggaaatattccgctgaattctgccctgaattccataaggaccaaaggccaggtggcgctcatcgcagaatccaaccaggcagtcattgacccgagcaatcagtttgtccggacgctggctgaactgaaagggtgctggtattttaaccggggagactgggaggagatatcgaatttcattgtgaatcataagattgatatgaagaagatatccagtcacacgttttctatcgcagaggcagaaaaggctttcccgttgtttgactcgggaaaaacccagaaggttgtctttgtgtgggaatagataaaacagtagtaacgaaacaggaacgaaaacacaggaggtattttatgaagagaaaattggcaagtgtacttttaagcacagtagtggcagccagtctgctggcagggtgcgggggaaatgaaacgtcctctgaaacgtccgggagtgaaaagacagcaaaggaggaaacgtcggataaaacctacccggagctggacctgaatcctaccgaagcgctgagtgtgagcaccgagggaatccaggcggcggcaccctctgcatttacccttacagacgaggatattcagaaactgaaggacgggaaatataaggcggctttctgctaccatacacagagcgatacctgcaaccagacgaagctggctaacgctaagaaaatgctggaagactgggggattgagacggtttctgtaacagacgcgaactttgatgcagcaacgcagacctcccagatcgaaagtactatggccctaaagccagatgttctttttgttatgccctatgatgcggacgcgtgcgcatctgccttagacgccaatgtaaagggaacagatacaaaattagtgttcatggaaaatgtagctacaggctataaggcaggcacggattatgcaggctgcgccagctcagacagctacggcaacggaaaggcctgtgcagacatactggctaaagaaattgggtataaaggccaggtaggcatgatgttctacgatttggtatatccggtgaccaatgaacgtgaccggggattccgggagacgatagagaactcttatccagatattgaaattgttatggaatccgggtttaccgaccctaacgataccggtacagttgcagatgctattcttgcaaaatatccggacattgacggtatttacgcatcctgggatataccggccgagggcgccattgcctccgcccagtctgtgggaagagacgacctgattatcacatgctgcgatctgggtgacaccgcagcgaagagcattgctacggacggaatgatccgcggatcaggcgctccccgttctccagaacagggccaggcagaagctcttgtggccgcttatgcactgctgggaaaagagatgccctctacctttgtgacacctcctgcattaccggtagtaaaaagtaatcttttggatgcctataagacaagctacgggattgaggctcctgactggctgcaggaccttacaaaatagaggtgcgctatggctgattatgtattggaactggaagggatacggaaagcttttgggggagtccctgtacttcaggatgtggatttccggctggaaagaggcagcattcatgccctggtaggggggaacggtgccggtaagtctacccttatgaagattttgacgggcgtatatgtaaaagatgccggagtctgcagagtgaacggcagtgagacggtgatccggaactataatgatgcgaaaaagcaggggatcagtctgattttccaggagctgagtcttattccgacattatccgtcagcgagaatatctttttaaacaaagagataaaaaagggcagatttctggatgtaaaggctatgaatgaaaaagcccgcaagctgctccttagcctgggcattgacattgacgtggaagaaaagattcagaacctcagtgtgggctgctgccagctcattgagattgcaaaggcattgtccagcaatacgtcagtcctggttatggatgagcccacggcctcactttccgacaaggagacagaaattttatttcaaatcattgacgggcttaagaaaaaagggatttccattatttacatatcccaccgtatgaatgagattttccggattgcagactgcatttccgttctctgcggaggaaagatggttgccagcaagcctgtctcagagtatacacttgagtctctgattgaatgcatgcttggcggtaagaaaaatgagcaggccatggtatggaaggaacgggaaactcccgtgggagaaaaagtgatgctgcaggtggaaaatctttccgtgggcaaatctgtaaaggaagtttcctttcaggtaaaggcgggagaagtagtcggactggccggtctgatgggaagcggaagaactgaggtgatggaatgtatcttcggtatccgcaagagaaccggaggcagaattttcctggatggcagagaagtgaactttaaaaatataaggcaggcggtcaacggccgggtagccctggtgcctgaggacaggcgccgggaaggcctggtgctgatgcactctctcagggaaaatatgatagttacagattttaacggtgtaaagagttccggactgatacggacagacaaaatgaatgcagttagtgaaaaggccattcaggatctgaaaataaaagcagacagtgtgaccaccagactgtttcatctgtcaggggggaatcagcaaaaggtggtaattgccaaatggctgaatacgcgtccaaagctgctgatgctggacgagcccacggccggagttgatatccatgcgaagagtgagattattgaaattatacggcaatttatcagggagggaaacagcgttatctttgtctcatcagaactgtcggagatgatggcggtctgcgaccgggttgtcgtactgcatgacggcgtaaaaaccggagagcttactcacagagaaatagatacagaggaggtattgcagcgtgcgatccaaaacaattaagaaaatagacttataccaatatatggtatacatcatatttattgtggtgctgatttttttcgccgtatggttaggaccaagctttttttccaggtctaacctgctgaatattaccagacagacagctatggtgtctgtaatggccgtggctatgacgtttatcatagccagcgggcagattgatttatccataggcgcagtagttgccctgtctgcgttaatatccgcatggctgctggagaagacaaacagtatcgccctggccctgttctgtgcccttttagtgggaacgctggtgggtatgatcaacggactgcttgtgacttatctgaagattccggcctttctggcaacgctgggcatgatgagtattatcaggggatctgctatgtggatgacggctacaaaagccattaccatccgcaataccacctttaacaatgtattcggtatgggaaccattgccggggttccgattgtgcttctctggacgctgattgcgcttctcatcggacatattgcgctcagataccttccctatggaaaaaaggttctggccataggcggaaaccagacgtcagccttttattcaggtatcaacattacaagaattaaaattatggtatttgccgtcatgggatttgcctccgcttttgccgggattatatactctgccagaatgcagactgcccggtatacatacggagaaggagacgaaatgaacgtgattgccgcggtggtgctgggaggtacttccatggccggaggaagcggtaatattatcggtgcggtggtaggctctctgctgcttggagtcatcaacaacgggctaatcatcggcgggctggataccagccagcagcagattgtccgggggattattattctgctggcagtagctcttagcaccttcaatacaaaagaacgtacatagagaaaggagtttaatcgatatgaaatatgcatttaacacatgggcgtacagtcattttccctgctgggtgccttcttactcttttgaggagacaatagaacggctggcgaggattgggtatgacggcgtggagatcggatgtgcacagcctcaggcctggccctactatatagataaagaaaaaagaaggaacatgcgcagaattcttgaggataatcagatttctgtggcctctgtacttcctgcgccggggggcggccccgggggaaatattgcttctgcctgcgaagaagagagggcatggacggttcagtattggaaagactgtgttgatctcggcctggagattggtgactgcaaaagacttttatgtgtctgcggatggtatatctacggcacaaagtccagggatgcctggaagtgggctgtggagggaatctcaaaagtggcggactatgcagctaagagcggtgttgtcctgatgctggaacctacggcggctgacagcaatctggtagagtcctgcgaggatgccataaatatgatggaggatgtagggaaagagaatgtgaagctgatgttcgataccacccatgcactgtatagaaatgaagtgccttctgattatgtgtatcttatgggggagaacctgaaacatatccatatggcggataatgacagaaaagcaccgggaaccgggggctgtgattttgtggatattatgcgcgccttaaaggaaattcactatgacggttatgtgactatggaaaatggatttcctaccagagattgtcatcccgatgtggtggcccggcagtctctggaatatttgaaaaaaatagaagaatcgctgtagcgggaggaaaattatgattaaggttggagtgattggatgcggcaagattgcgcaggtgcgtcatcttcctgaatatgctgagaataaagatgccgagattgcagcagtcttcgacttatgccgggaaagagctgaggaagtggcggccagatatggtgcaagggcttatgactcttacagtgagcttctggcggaccctgatatagatgcggtgagtgtatgcgccgcaaatgcggctcactgtgagattacagttgcagcgctgagggcaggcaagcatgtactctgtgaaaagcctatggcaattaccttagaagagtgcgagcgaatggtagagacggcaaaagaaaccggaaaatatcttatggtaggacacaatcagcggctgacaaaggcccatgcaaaggcaaaggagctgcttggaaagggagaaatcggcagcatattaactttccgcactgccttcggccacagcggaccggaaacttgggccattgacagcaaaagcatatggttttttgacaaaaagatggctgccttcggtgcaatggcagatttaggaattcataaaaccgatttgattcagtatttgacgggacgcagaatagaagaagttatggctgtaactgcaaccttggataaacaagacgcatccggaaagaaaatcggggtggatgacaactctgtctgtatctataaaatggacaatggaatcgtgggaaccatgaccgccagctggacaaattatggggcggaagagaattggacagttttgtacgggacagagggtgtcatgcacatatatgaagacccgaaatactccatcataattgaaaagaaagatggaagccgggtgtattaccaggcagatcagatacagaccaacacgtcgcagacaaaatccggaattattgacgcatggataagctgtctgaccgaggggagagagccggagatatccggtgaggaagccctgtgggctatgagggcggtatttgcagcgttagaatccgcagaaaccggaaaggcggtcaaaacagcaccccattaggttaggaggtattaaggtaaatgaaaagaccaataacattagcatccgggcaatttggggatatggacttggaatccttgtgccgtatggcctctgagattggatacgaaggcctggaactggcttctcacgcgcattttaatgtgactgaggcactggagacggaggactatattccccgggtgaaagaaaccctggagaaatatcacttgaactgttatgctgtttctgcccatttgacggggcaatgcgtgggggacagatgggatcccaggctggataattttgcgccgggagagctctccggtcagccggagaagattcgggaatgggcagcagaggaaatgaagcggacggtgattgcggcttccaaaatgggggttaaggttatcacaggatttacaggatctcccttatgggcctggtggtattcttatccccagactaccagaacaatgatagaacagggatatgaggagctgtgtgagctgtggaatcctatctttgacgtgtttgaccagtatggggttaagtttgccttagaagtacatcccacggagattgcctttgattactataccacagaagagctgctgaaaagatttcggtatcgtccggcattggggattaattatgatcccagtcatctggtatggcagggagtgaatgaacttacatttctcagagacttcagagagagaatctatcatgtccacataaaagatgtgaagataaacaggaacgacagagcaggcattctgggatctcatcttgaattcggagataccagaagaggatggaactttgtgtctgtgggacatgggaatgtggatttcgacgggatcgtcagggaattaaatcagatgggatatgagggccccctttctgtagaatgggaggactccggcatggaaagagaaaagggcgccagggagtcatttcaatatatacaaaagatgaatttttcaacctctgatattgcatttgacgcggcgctgaaacaggaatagaaaagggactcagactatgttccccggctgaatggaaaaatttaccatcagccggggaatgctttatcctttacaattaaatgaaaaatatttaattgcaggaggataagatatgcagagcaaaacctatgggtatgtccgtgtatccacaaaggaacagaatgaggaacgccagatgattgccatgagagaatttggggtgccggattctgctatttacatggacaagcagtcgggaaaggattttgaacggccggactataagcggttaatgagaaggctaaaagcgggagatgttctggtaattaaaagcatcgatcgtctgggaagaaattatgatgagatcttagaacagtggcgcaccattacaaaggtgaagcacgctgccattgtggttctggatatgcctcttttagataccaggcaggggcgggatttcacaggagttctgattgctgacattgtgctgcagcttttaagctacgtggcccagacagaaagagaaaatatccggcagcggcaggcagaagggattgccgccgcaaaagcccggggcgtacatatgggccggccgccgatgaaaacaccggccggcttttcttctgcaaaaaagctgtatcaggcaggaggaatcagctcccggcaggcggccgggcagctgggaatctcatccactacattccttcgctgggtcagacagcgttaagtcagaagttcccggattctctccttaatttgggacttaacctttgccctgaatacccctgtatagccggcacgatctgcaattttaagcaaatgctcctgacagagatttactatctccggctggaagatttcaaaaacggtcaaaggctgtgcggttcggaccaagagggccagctgtccatctttcactataagagtgccctctttatcaactcttggatctatgggtataaagtggtaattctcaaaattttctaaaatgcggagaatgttcttaagatgcatgacgtaaatttccggcgtgtagtaaagagggggaccttcgccataggacagaataattgggacttttccgcttcggacatcttccgcgctggcaagacaggcaatatctataaagtcatgctttttccaactttcttcaattagatggaactcctcaaggtacattgatcctaatcttttcagtttcggctgctcgatatggtcaatgcagtatgtcattatttccggcggtgctgtctctgccgacagggagattaccttctggatacgggcgccgttcagggacaggaagcgggcaaagcactgcatcagcttctctgaggtagtataaatgttctgcataggacggcagagggacaggtaatcctggaattgagatgcgtatgtatgggtcagtctattgtccgtggttattatagtagcgcccccggactgctgatgggctatggatgcagaggtcatagcaatctctccgggtactacgagaagcgtgcagcggtggacactgtctcgaatccggggataaacataggtagttactcttcttgttaagtaaatgggcagccagcggagaagagaatcaaaggccatattaacctgagaggtgggcggcgctatatgacaaaaccggaatccccggtgacagagggttaggccccatttctgcagactgccggaaaattcaaagtcttcagaaatccagctgtcatcttcatctgaaaagagataaatagtataagactttttcagtgtgagcagatgctgatatacggcacgtgcggcggcgcgttttccgtcatttccataaaaggccctgttttccgcccttgcggttgcagtctctgccaggggcggggcatctccatcctcaatggacagagtttcaaaggttcttataaaacgtcccacctcatctgtttcaccgcataaccaatagtatagaacttctgtgagtaaatcttttttcattgttagagcctgtctgatacccaacattccagagagagcctgcctttgatactgtgtggtgcagcgttttgcaaaaaaagaagacatggcctttatctgttctttgtttctgggaattcccctggttcctgtgcggagtctgctgatgagggagggatccactttgagctctgttgcaagcatacggtttgtaacctgtgttaaattaaataaaaaaattagtttttcataaaattgcatagaatctctccttttctttagtatacaaaaagatgaggatatttacaatacaactgtcacagataatgacataaaaatggcattgccaaaacgcggggaagacttgttcttttatggaaaaagaagtattctaaggtcacagatacagagtgtgtcgtttgggttattctatatctttatctttgaaacaaaaggtacactttttatatcaatataatgtcaagatgattgacacatttagaccgtccttgtgggcggttttttgcttatttcaagtattcttcttatgccactaaaggtgtaccataaattacaagtacatatttggcacagctgtcgaaaggcagtgtcgcaaagctataggggtttctctttttcgcttatgagcgaaagaaagccagccagttgtttgaattcataagagcagctttgcagagcaggctcttttttttaccgattttcggattaacgcactttatctcctataaaaaagcaggaaaggaagctatccagatggaaaaagaatgtatacttcttagagttgcagagcggtcagggtacagcctggccgagacggagcagttttacacggcgtttgtggaagtctttactgagattctgggacagggggagactatggaatgcctgccggaatggggccgtttcattccaaaagtgaatgacaatccggcgagaaaccccaattcaccccggaatcctaaaaagatgcattgctttgtgcagttcaaaccgggaaaaaagctggagagagccctttgcctgggggcttcccatcgtatgtccggggacgcggacacgctccccaaaggaattgaaaagggatagccggcctatccggcgtctcctcgtgggatggcgcggatgtgcttgaaagggtaacctgaatctagtatgggctaataaaatggaaaagagggatctctgtgaaaaacgaaaagaaaagtttaccgtcattgtccggtgtgatcggtattttaatgtgtgtgatatttattcctgttattattgttaacctgattttaattatcagcagttatagtaatccggacgaaattcctggtgtattcggtgtaaagcctgctgtggtgctctccggctctatggagcctgccatacaggcgggagatttgatctttatacgggagacagacccaagtgacttacagaaagatgacgtaatttgttatctttcctcaggaaaggcaattacgcacaggattgccgggataaccacaggggaagacggaaagcttcagtttgtaacccgcggagatgccaataattctgaggatcagctgccggtcagcgccgggcagattcaggggatttggaaaggcggacgcatcgggggactgggcaatttcatcctttttatgcagtcaaccactggcatgattctttttattatctgcccgctgctgcttttcttcctctgggatatctggcaccggcggcggctggatcaggctgagaatgcccgtaccaaggaactggaggcggagctgaacgcactgagggctgggaaagagacagagaaagagaagccggatatagaaacctaatattgtatgcattggccttaagcctgcgggcacagcgcaggggacagggcaatacagaaccgggtgcgaaagtgtgcctgggataaagtgccgcaggcacacgggagccgtgtctgggccaaatgatttttagctgacagggttcccttacaaagacagaaagagaggataacgttatgaaaagaaaatctcaagcatcgcgtctcggcgtcctggcactggccctgacacttgtcaccacctgccttacgggcggaaccatggccaaatatgttaccgaggttaccggcaatgcaacagctgctgtggcagcctggagtttcaaagttaacaatgaagagactactatgacgaatattgatctgggaagtacggcaaacagaactgcttacgttacagatgatattaaggagggggtgattgctcccggaacgtctggaagttttgatattgtaattgatggcagcggcagtgaggttggcgtggactacaaattaaatattgcagcagcagatggaacaacacttcctagtgatttgacctttactactgataatgcttctagtggtacccaagcctcttatacacttaataatgaattaacaggtactattgattatgcagacggcgctacggctatgaagaaaacgattactgttaaatggacgtgggattttggagacagcgataccaaagacagtaatgataacagttatgcagataaagactggaccctgaatattaccgcaacgggtacacaggctgaaccaaccgctcagaatccttaacaaatatattcgtccttctgtgccggggcgtattaccgaaggcttttcagccctcggcaaaggacacggaacagccgtgttctttgccaagggctgaaatacgaactttctcatagggaggaaagaatatggaacaacaggacagcttaccgataaaaaaagacagcgggcagaacaggcggcgttggatgccggctctttttctgctgctttttatagctcttataacatcctgcgcggtaggctttatcctgggaaagaatgcaggaccggcttccctgggacagattatagataccattcttctgacgccggaggagccttcttcacagaccgtctttcatctttccggtcaggtgctgtattccgatggaactccggtttccgggcgggaactggaacttcacagcgatcccattaccacagtatcagggtccgacgggagctttctctttccaaatataacggaaggaaatcataccatctttgtcctcaacccggatggcacagcggcggcgcaacgggaactacaaatccagtacagcgatgagggggaggcatccattgaacttcgggataacggatcgtatgtgattcagctttccctggatattcgtatgctggagattatgattgagatggatggagagaatattactattaactctgagaatatatcctatgctacacgggatggcagggtggttacgcctgcagggagcgcctctgtaaaagacggtgtgattgtgactcccatgggaaacgtatatctgccggatggaagcattgtgtttccgggaggttccaaagacgatgctacctatatcatacagacagatgatacggtactgattaaccaggatacttccgcaggggatatcacagtttcttctgacgggacggtaaatctccccgacggcacagtgattgagccgggaggtagaattacaacacctgatgggtcaaaaacaacccctggaaacaccggtgtagtcataaatcatgagacagcatcccccattgggggcagcacccagaaccagaggaatccccagaaccccagtaccgggacttcctctccggcatccggaaacggacagaccgcagggcccaatccatcgggaacgtctgattcttcggatatgaatgccggtacccagtccggaccgtcagattcctcagataccaataccaacagtccgggcggggaggacaacagtacaactgcagtccccgaccaagggaaacttcagacctccaggcaggataaggacggcagttttaaagagtgggagcagaatgcttctatcaatcttttttataaccatgagacaggtgagattgaaaagatagcaccaggctccagcggctattatgtcttccgcctgaaaaataccaggaaggaaaagcttacagttactctgaatattgctgaaagctccggcagtcctcaccttcccctaaaattcactctgcatcctcagggacaaaagggaggaacttccgtctctctgggaacttcgggagaaggagcggttctggagacagtacttgcggccggtgcccaagccgtctatcaattggactgggagtggccctttgagagcggcaatgatgagtcagatactgcagcgggcagccggggcagtgcctatgttctgctgctcaatattcatgcggagggaaaagactgagggaatatatcataaaagaaagaagggggccaaatgaagaagtatctgacaaaaaagcggataatctgttatcttttctgttttattctggtttgtactgcagtgctgggaatcacttatgcccgctatcggacggaagttgccggtgcggctgctgccagtactgccgatgtggcactcaacagttccattgacctgagcagcgcactgaagaaaatggtgccaggggagaagagagagattttgttttccgtcacaaaccaaaaagacgcttcggtgagcgaagtagcacaggaatattcagtaagcgttacttccacaggaaacctgcctttgacctatgaactggcagaaaaggaagccgtcagcaatggaacaagcgtggaatctcctccgtcagttcaagacttatcttatgtgtggaccgggggcaggctgcctcacggtgctgcggctgtgcacacttatacattgaccgtaagctggccggcagcccaggcggccggcagctatgcggatgaatttgatcggatcactctgacggtagatgcaaagcaggtaaaacctaagacgaactaatggacaggaggcacaggtatgagatttttacatatagaggataaggacaaacgccgctggcttccggccctggttattctcaccgctgcagttttgctctctttcgttggaattacagtggcacgttacatcacccggcaggaggggaagggaatcgctgaggcagataacttttactttaccagtgatcttctgagagaaaaagaagagaacgcttgttattatgtggacccccagacaaaagagattacagttacactttctaatgcagcggatgcgaggagagtaacgcccgggacaataacataccgtgtggaagtaactggcggtacagttgtctctgggagcggaagtctgccaggggggaaagaagagaaagctattgtttctgtttctcctgatcctgatgcaaaggaactatcagttacggcaacagccgcaccatatgaagagtcactctccgcggtttttaaactggccctggggaatcagtacacagtagaagatgctgcgggtaatgcagcagccgtacttaccataacctgtacggatgacagaaaagagatccctcttacacttccggatcaggttataccagaagagaccaatgacagagtggaaaagggaagcggcggttacatgtataagagtcaggggaaaggaatttattccctggtacttttaaaagcagataccaaacaagatttaacccaaaagggcagttttggggatcagattgtgttaacaacagaaccatagcggaaaagagaagctgtggttttgccctgttcataggaggagcgacatggaaagaaaacagaaaaaatttagagtgcacagatggtaccgtgtcctggcagttttgctggtactgtgtctggcactgagttatcttaatatgaattccatcctggcttatgcagaaggcagtgctcctgtgacggttgatgtaggtgaaaatgtgtcagctgtcctccaggacggaatactgaccctcagcgggcagggaaacactgcagattttagtgcagagactgccccgtttctgccatatgcagaggaaatacacactttgctgatagaagatggaattacctatatcggttcttatctgtgctacggcctggggaacctaaagggagtactgacgcttccgggaagtatatccggttttggagactatgcattttccggcagcagtcagatagatgcgcctgcatttacggagatacataatgaattcacagggacagatatctttatgcagcaggccatagagcatccggagactattttttctgaggggcaatccggaactgtggatgtttcggagtataatctttcctttttttagtcagcccaggccgccggatactctataaagagcgaatctgtggaggcgcttccggatgatatgacggagccggaacttcctgcatctgaggaggcagccgcggtttctgaagcaccggaagtttatgccgcagaggcagcgggtacagtgtatgtggatcagggcaacggaagtgatgagacagggaccgggacaaaagctgccccttatcgaaccattgagaaagctgccgcagggctgcaggaggcaggggccggcagcacagtggacgataataaaattattattatagggacttatgaattgcagagcagggacttattaagcgagaatcccatacctgtcacaattgcaggaaacacaggcgactgcgtattgaagggtctgtacgaagcggggcaggacaagtcggagctgcagttatacttatatgagggaatatgctttgaaaacattaaaataaaaaatattaatcatatctatggcaatggacatgacataactataggcaagaatgttgtaaatgccacaaaagagcctgatgattactccctgggattctatttatacggttcagggcagcatggaatggtagggaattcggttgggaaaatttctgtctacagcggtacaaccataagaatcgtggggtatgtaagaaataactccagtattaatacatcaggcctgaaagctgatattacggtggggggaacggccaatgtgtcaacggttgttgcagggagtgccagcggcgcggtaaccggggctgatgtggcgatttctgttgaaggcggctacgtgggcactttaattggggggaatcagggattcagcaatatattatccccttatgagggggatacatccattactatttccggcgggaccgtttcaaccattttaggtgcgggcagcggcagagcggtaagtatcccaacgtattgcggcagcatgaagattaatgtatctggtggttcgataggaaatatctatggggcaggctctgcagcttatgtgctcagtaaagataatcaaaagtctgaggttaacatatccgtgacaggcggcagtatcaataatatttttgccgccgggaaaggcggggacaacagtgtagcagagaacgagaacatcaaattctcggaaaagactcccccggggatgttcggcagtatgaccggaacggccaacatcactgttggaggcaatgccgtgataaatggcagtatttatgccagcggagagggatatgtggaccaggaatatggaacagagaatgcatttttaagcggcagtgctgatataaccgttaaagacagcggcattgtgaaaggaaatgtgtacggcgggggcaaggggctgaaacagactggatatgagagctgcgcccgggtggaagcagattcttctgtggaggtaagaatagagggcggcagtatcgagaacaatgtctacggcggcggagaaaatggtatcgttcagggaaaaagtatggtacatatgagcggaggtacggttaaaggaaatgtctacggcggcggggaaaacggtttacatgaagggaaaacagaagtgcacctgggcggtggcattgtggagggctccctctacggaggtgccctgggtaatcctggggaacgcttggtatacgggggctccacagtgaatatgactggtggatggattcgcggcaatctatacgggggcagcgagctgagcgatgacggtccgaaacctgtggaaggtgagctggcagaagacttaaaggatttgatttttgtgaatctggctggaggcaccgtgagcggcaatgtgttcgggggcggctaccggggaacagtcaacggttctacacatcttcatatcggtgtggatgcacccaatgagtgtgcttactatgcaaagcatacagaagaaaaacccattctgaccccatcggctttatctgtggaaggctctgtctatgccgggggggattatggcggcggggataccgttgattatgctacaataacagttaacggtacctcccatgtctatattgacggaacaggctataatacaggggcatctggcagcggttcagacatggctattgcgggaggtgcgtttggaagcggagcttcctgtgacgcaggatccatccgtctggtgactctgaaaaactacggcagtccggttaacaatgatgcaggaattgcgaagggagctacccgaactctgtcagccatccagagggcggacagggtagttttgatgaactctcatgtaaagctgaccgggcagtccgatgtggcgaatcccaaccagacagccttgtattcgctgaaccgtatcggaaaccatgggaatagcagcagcctgggaactctgggaaatagcctggtgctccagggcggcagtacactggtgctggaatcagcagtgaacgaaacggcaaacttcaaaagtgtggataaggacgggaatagcgtggcaatgaatcagctggaaacttgtcccaacacagtcatttttgacaccggtacggtttttcgcatcgcttctgtcagcgagaaggatgtatcaggggaagagctgtacggggaagtatccggttacacctatttgctggcggatgataaagcagatgcctatgcctatgcccgtgccaagacagattcacagtataatacggacggaggctttgtggatcccgagaataaggagaaggaactggagtatacgaatgtaggaactcaataccgttactggcggatacagggaaaagagtctgctgcggcatcccgccatatggtgctgacagcacaaactctggcagaaggagacagcggattcggaagcgatggatattctgtggcagaaggaaccatagaactcccaccgacagcggcaggttctacatatacggttacaagtatcacgattcccacagaaaccaaccttgtcctggcagatgcggcgaaaaaagaagcaggagccgacagctgggcgacggcagcagagaatcactcttcaaatacacaagagattattctggaacaagagaagcaaagaatacagggtgacagtgccttcggcctgtttatgaaaattggaagcggattttccaatgcggacagtgcttccggcaaggtgatctccaaggatacggcggcggcagacggaaaaaattctataatcggacagcagacagcgtctgctacagatgggggtgcacctcatatggactttatcctgacgtataaaaatcaggacatttccgtcagcaaggcgctgggtacagtggtgatcgagctgacgcgaaacgatggggcagtgctgaatatgaatgtggagattgttacaaaagcgaaggctcttgcagatcagacggttgaactattcccagagcggcagctataccggcaggatgatcattccgtccggcgtcagccggaatctggagcttacaaaggtttctgcctcctcctcttcttttgtgacaggcgacagtcagctggaaaagaataactttgccgtatctatgctgccggtaaaatcacagggatggaatactgcaggtctgttgacagaggcatatgatttaaagacatttgcttcctctcctgttgccataggtactacggacagccgttaccaggcttctgttgagtttactctgcagaatgcgccgggctttcctgctaaacccgaatcggatgttgtgaccctgacgcttacagacatgaacagcggtgagtttcaggttacacttaaaatccactggaaagattctattgtgtctgaggtaaaaacagctcctggaaggcagtacaatgggatatctgcccaaaaacccagaatttcccagaaaagtgcggttactgcggcatttacacttagcggtgatgagaatgtctcaaacctttggctggaactgcggagaggagaagcgggcacacctgtgctgttagcggagaccacaatcacattaatcttgtccggccgtttttacagctatcagataacagggaatgaatcttctaataaagtcagcctgtcacagtttacacagatgtgggagagcactaagcttggaggcaacatttctaagaatgcagtactgacagtaatcatggattttggaaagacggaaggcctctctaacgatgattatagtttgcgcttgcgaagcgatacgagcgcagattcctcaggggcagaatttactgtgtacaatgaagaagctgcagttagcctgtccgccgacggagggctttccagaggagcatatacgttccatctgaatattgcacctaatacggatacaaatttgatggatggtgcggcggcagttctctatcctgagagcggaagtctcccggaaggggtggtatttgagtacaagggggaagaatattatcccagcggcggaaaagtgtatgtgcccctgggagcacccggagctcacgatttagttatgaatacttcgaattcagccggacttgcggcgggagatcttaccttcaaggcagagatttatcccataggtcaaagtgcgggtgcggcattaaaagcttggtctgcttcctgcagctgcaatgtgaaagagaatccaaagcaagctctcctgattcgattagagagtgaaagccgcattgtgaaagcagggacacagcttacctttgccgctgactattctgttacaggcgaaggtgggcatgcagttacactgacggtagagaaaaaagagaacggagtttatcagccggctgagaattggcagtacagcgggggccaatccatcacaaatacctcaggtacaaaatcaattgatgttacagtgccggcatcggctgctgccggcacctaccggctgtggtttagattcggggaacagtctgtaccctataatataatagtagaatagctctacaagaaacaagcgactggccaaatgaaaaaaacggtgttcggaccactggtccgggcgccgtttttaccctatctctaattcaatcctaaaacattcaggggaatctcattaaaaaagtaatgacaccccatcagttctatgtaatccagagtgtctttatactgttctgcccgaaaccagtcattcagcagatagacatactccacccacatattcagaggactgaatagcttttgatattcccatttcttaaaatggcagttggggagcttttcatccacagaccccggggaactttgaaattttttttctataatatagacggttgcgttgttataattaatgaatgcttcgtctggaagccaccgtttagaattatagtatctgtagtcgatccctctgggttccagaaattgggtataaagcttggccttggccacggacatgccgatgggctgctggagcataaagctgtcttttcgataaatgctgcagtcgatcacttggtagcctctgttttccagggcctcattcagtgaagtagtctgttcaaagagaaggccgttggcattggttctggccccgcccccatggatattaggtgttttggacatagttttcctccctcagtatgtgttttgtccattataccaatctgcagagcaaaaatctactgggaagacagaagatacctcttgtcaaaccatagtaaattggactataataatcaagagtgttccaggataatacaggaaattcaggaaaaactgatagtgagagaaagggtcacatactatggaaattttgaaacgaaacgggcaggcagaaccctatcagtgggaaaagatagaacatgcagtacgcctggcattcctgagtgtaggacaggagccggataaggacacactgcgggatctcacagaggccgtggaggccaggatccagaaattggtacaggagggggagacactccatgtagagctggttcaggatcaggtggagaagacactgacagagagaaattattatgaagtactgaaaagctatatcctttatcgggaggagagaagcagaaagcgaaaggccaggcagaatatcgccgcttattttgcggagacagaggcggacagggaggagatagacagaaccctgaaggctgttcagtcagaatatccggacacaccctacgatctggaacatctgctgattaaattcacctctttttttaagcagagcatgaatgggaaggaaaggcttagaatcctcacccaggcggcggtggagctgactacccaggaagccccaaagtgggaatttatcgccggaagactctatatgctgcagtttgataagcagttaaaaaaggatatgaagcagtatcaaattatgaacttttacgacaaagtaaagtatctgacagaggaggaactgtatgggagctatatactggaccactactccagggaagagctgctttgctacgaaacctatatacaggaagagcggaattatctgctgaactattccggtcttgagctgctgctgggcaggtatgtgattcggaaccggcagcagattctgctggagacaccccaggagatgtttttggggattgccatgcatctggctatgctggaaacaaaagacagggatgggtgggtgaggcgcttctatgatatgctgagcaccctgaaggttactatggcaacccctaccctttccaatgccagaaagccataccaccagctctcttcctgttttattgatacggtgccggacagccttacgggaatataccgaagcatagataattttgcccaggtgagcaagtttgggggcggtatgggactgtatttcgggaaggtgcgggcagcgggaagcagcatacgcggctttaaaggagcagcaggaggcgttatccgctggatcaaactggccaacgacacggcggtggcggtagatcagctgggggtccgtcagggcgcggtggctgtatatctggatgtgtggcacaaggatctccctgaatttctggcgctccggacaaataacggggacgatagaatgaaggcacatgatgtctttccggcggtatgctatcccgactatttctgggagcaggccagggataatctggagggagactggtatcttatgtgtccccacgaagtgcagacagtcaaggggtatgccctggaggatgcctggggggaagaatggacggaaagatacctggactgtgtagaggatcacagaattcataagcgtgttatccccatcaaggatattgtccggctgattataaagagcggggtagagacaggtactccttttacgtttaacagggatctggtcaaccgggcaaatccaaacagccataaaggagtcatctactgcagcaacctctgcacagaaatcgcccagaatatgagcgggatttcccaggtagatcagagggtggagaccatagacggagaaacagttgttgtgacggttacaaaacccggagattttgtggtctgtaacctggcaagcctctctcttggaaagattgatgtgaagaatccaaaagagattatggagattacaagaagtgcggtgagagccctggataatgtgattgatctgaatttctttcctgtcccctatgcagaggtgaacaacaaaagataccgtcccattggcctgggcgtcagcggctatcatcatatgctggcgaaacagggagttttatgggagtcaaaagaacatctggagctggcggatcaggtattcgaggagatcaattacgcagccgttacagccagctgggaaaatgcggcggaaaaaggctgctacgaatattttgagggaagtgactggcagacgggcgcttattttgaaaagcggggatatgaaagcagccgctgggagaccctgaaaaaccgcgtaagggcggatggactgcgcaatggttatcttttggctgtggctcctaccagcagtacaagtgtaattgctggtacaactgcaggggtagatccggtgatgaaccgctattttcttgaggagaagaagaacggtcttatgccgcgggtggcgccggaactggatctctccacattctggttttataaaaatgcccatcatattaaccaggagtggtctgtgagggccgggggcgtgcgccagcgccacattgaccaggcacagagcatgaatctgtatattaccaatgattatacttacagccaggtgctgcggctgtatattctggcctgggagtgcaaggtgaagacgctgtattatatccgctcgaaaagcctggaggtagaagagtgtgaggtatgctccagctaagagcagatgaattaggaaacaatgacagaggagaatagtatggaacagctgaaaaagaaacccctgtttaacccccagggagacattgatgtaagaaaacgccgtatgattaacggaaatacaacaaacctgaatgattttaataatatgaaatatacctgggtcagcgactggtaccgccaggccatgaataatttctggatcccggaagagattaacctggggacggatgtgaaggattacgtacagctggcggagggggagagaagagcatatgataaaatcttatcgtttctggtgttcctggacagcatacagacagcaaaccttcccgcggtaggagaatatattacggccaatgagatcaacctgtgcctctctatccagaccttccaggaggcggttcacagccagagctacagttatatgctggacagtatctgcgagccccagaccagaaatgaagtcctgtaccagtggaagaatgacgagtatctgctagagaggaatacttttattgggaacctgtataatgaatttcagagagataaaagtccctttacttttgcaaagacactggtggccaactatattctggagggaatctatttctacagcggatttatgtttttttataatctggggcggaaccataagatgccgggttctgcccaggagatccgatacatcaaccgggatgagaacacacatctgtggcttttccgcagtatcctcctggaattgaaggaggaagaaccggagctttttacagaggaaaaaaccgcagtctaccgggatatgatccgtcagggctgtgaacaggagatccgctggggacattatgccataggagatgacgtgccgggacttacccgggaaatggtaacagagtatatccagtatctgggaaacctccgttgccaaagcctgggattcgcagtattatatgagggtagagaagaagaaccctccagcatgggatgggtaagccaatacagcaatgccaatatgataaaaactgacttttttgaggcacggagcaccgcctatgcaaaaagcagcgcattggtagatgatttgtaattcctgaggcttgttttcttccgaaaaaattagaaagagaggatttgctatgaaaccgacagaacttaaaaaggacctgtactggacagggatctgcgacacagagctgagggtatttgacattatcatggagaccgaattcggaactacttacaattcttacctgataaaaggcagcaaaaagacagcccttattgagaccgccaaatataaatttttcgattcttacgtaaagaagctggaaagcctcacggatctgagcaaaattgattatataattgtcaaccatacggagcctgaccatgcggggagtgtggagaagctgatagaactgaaccccaatattaagattgtgggaaccgcggcggctcttggatttcttaagaatattgtgaacagagacttctacagtattgcagtgaaggaaaatgatgtactgtctctgggtgataaaaacctgcgatttatgatccttcccaatctccactggccggataccatgtatacttacctggaagaagaacaggttctttttacctgtgactctttcggcagccactacagttttgacggaatccttctcagtgaagtgacagatgaggagggatacaaaagcgctgcaaagtattactttgacaatatcataggaccctttaagccatatatgcgtaaagccctgaaacggattgaagatcttccggtcagtatgatctgtacgggccacggcccggtgattgactgcagagtcagggagattatcggctggagtgatgagtggagcagagagacgaatccgaatacagaaaaaacggtcattattccctatgtgagtgcctacggatatacgaaagaaatggcagaagagatagcccggggcatacaggacagcggtaagatagctgtccgcatgtacgacatggtagaagcggatcctgcaaaggttatggaggaactggggtatgcggacggcatcctgttcggtacgcctacgattgtgggggaagccttgaagcctatctgggatcttaccacctctatgttccccagaatacacggcaaaaagctggccagtgctttcggcagctatgggtggagcggagaaggcgtggaacacattctggagcggctccgccagctgcggatgaaagtagtagacggactaaaggtacgttttaaatccggtaaaaatgatttaattgaggcatatgaatatggatacaattttggctgtatccttcagaacaaagaaaatccccgaacaaaatctgcaaagcgaggtctggtaaaatgtctggtatgcggggagatttttgacgaaagtctgcagatttgtccggtgtgcggcgtgggaaaggaaaattttgtgccggttgaggaagaggagaacaatttttgcagggataccagcgaaaagttcctgatcctgggcaacggtgccgcaggcgtcagtgcggcggctgcgatccgtgagcgaaatgccacatgctccattgtcatggtttctaatgaggaagtgctcagctacaaccgtcccatgctgacaaaatccatccttgccgcttttcagccttcgcagcttgcgatccacgaggagagctggtatcaggagaagaacattataaatgtgctgggaagaaccgtctcaaagattgacacaaaggaaaaagaagtggaatttaccgacggcatgcgcctgaaatatgataaatgcatctatgctctgggatctgagtgctttgtaccccctataccgggcacggaaaaggaaggggtaatcgctatccgcaggcttaccgatgcggtagaggtaggcagccttctgcctaaaattaggcatgcggttgtcatcggagggggtgttctgggactggaagctgcctgggagatcagcaaatccaaatgccaggtcactgttttagaagcagggagtcagcttatgggccgtcagctggatgacggagccagcgctcttctgaaaaaaatagcggaagaacagggcatccagatccgcctgaatgctaaaatcagcgccgttgagggggataccagcgcagcaggggtgcgcatggacgacggggaggtgattcccgcagaacttgtgatcatctccgcaggagttcgggccaataccgcggttgcggatggggctggaatcaaaatcgaccgatctgtggtggttaatgagaaaatggagacaagtgaagcggatatctatgcctgcggcgactgtgcccagttccagggtatcaattatgccatctggccccaggctctggagatgggtaaggtagccggcgcaaacgctgccggggacagtctcgtatatgagacggtgcctgcagctttgagttttcacggaatgaatacctccctgtatgccatcggcgatccgggcaagaagccggagacaaaatataaaaaggcagagctggcggatgagtggaagaatacctatgagaaatactactttgtaaataaccggctggcgggggctatcctcataggagatacctcaaagatggcgcaggtgacacaggcgatggaagagaatctgacatataaagagatgtttaagtgattggttttgggatgtaaagcttaggaagaaggtggacttcagacggacggatatggaagggcgggccggagggcactggcaccccatcccctggggtgccagtgccctccggcccgcccttccatatcctgacagaggatcactttatattcatagaaagtgggagggtagagtcgtatgttagaagctgccacttttttcatcttttatccattttgtgaatgcagcatcttagattttttctgagcaaacaggtgagagggagattgtgtggggctggccgctggagggatggctgtgttccgaggacgattccgcaggagtgattagagagtcttgggcaaaaccgggattcccgcaggagattttttcggcagtccaggccgaaaaaaagtgagaatggacagagaatgcatctaaagcattctctgcccatacgaacggtgctccggagggaatgccggttttgtcttagactctcttcgcgacggaggtgtccccggaacacagccatccctccagcggccagccccacacaatctccctctcatcgtccgtctgcgacaatctcggttttaacagtcaaacctcaaatcacaaaacaatatcctctaacttcctcttcggcacataatgcacatcattatcatccctataatactttgtattcccatcggtcacctcggtaatgatgactgtctcgtcaggtttgccaagggcaactacgagcatgggaatgagggattcagggaggctgagggcggcggaaagtttttcggggctgaagttgccgatcatgcatccgcccaggcctttttcagctgcggcaagaagtattgtctgcgcagtgattcccacatctttctggaacagggtcagagattcgtgaatctgagtatcctgacagatgacaaggtaagcggccggctctttgccgggatgggggagtttgagatgagggagtgcggccgcccattttacaaggggatggatccgggctacggtgtcttcctggtatgccagataatatttcaggggctgaatgtttacactggccggggtgtatcgggcgcagtccaccagatccagcagttcttcctctgttattttcctggagggatcgtacccgcggtagcttcggttttgcttcactaaatctttgaacataaaatagcctccttctttttattttcagcataagacaaagttaaatatttgtcaatgaacatagaaaaattggaaatttaacaggagaataatccgtccggattgcacaaatactatctatgtgaggtgatagtatgatagacaatgaagaactccccatcggctttaccatggaactggccatgcattcagacgctcttgtgcgattctcaaatatgaataaggaagagcaggaaaatattatagacggggcaaaacagataaaaagcagaaatgaaatgagacattacgtggagaatatattttaaatctcccaaacagccaatgagagaacaaaaaaggttcttccattggctgttttttattgcatataagaaagttctccgggaagaggagcgcagaggcgggatatttatttaacaaaaaagagaaaaaagctataaaatgtgaaaaaataatcaataatggaaagctataaaaatatagacaaaaatattctgttaaattcattaaaatctaataaaatcacgaaaaatatcaaaataaaattgacaggttcaaggactgatgatatagtgaaggcaaatcaaaactggttggaccagtaaaccaattataccagttaaaagaaaggaggagtatggggttggcagttaaggtggagaaggaaaggtgcaagggatgccagtactgtatcaaggcatgtcccaaggatgcagtttccctgtccggcgaaagaaacagccaggggatcgagtacataagtgtagacctggataaatgtgtcggatgcggaacctgctatacggtttgcccggatttggtatttactatcagttaacggaggaggttaaaagtattgggaaaggtattgatgaaaggaaatgaggctctggcagaggctgccgtaagagccggatgcagattatactgcgggtatccgataacaccccagacagagttaatggaatatctgtcggggcgcctgccggaagttgggggacagtttgtgcaggcagaatcagaggtttcggcgatctctatgctgtatggggcggcaagtaccggctatcgcgtgattacggcttcatcgggaccgggattcagtctgaagcaggaagggatttcctatatggcatcccagaacctgcccggagtgatagtggatgtatgtcgttatggaagcggcctgggtcttatctgcccgggacagggagattattttcaggccaccaaagggggcggccacggagattaccgtctgcctgtgtacgcaccacatacgcttcaggaatgtgtggatctggtgacactggcatttgaaaaggcggaagagtatttaactccggtaattcttcttacagacggagccctgggacagatgatggaaggcgtggaactgcctgaaatgcagccggtggatccggataagccctgggcactgaaagggaaaggagagggggagtaccggttcctgattacagatgcctacggcgggccggcctatgacgagggactgcgaaaaaaatacaagcagatagaagacagagaacagagatgggaagccatagagactggggatgcagacatcatactggttgcctacggaacatcagccagaatctgtaagcgtgcggttaaaatgggaagggcacaggggatccgtctgggcctgatccggccggtgactctgtggccgttccctttccaggcattcaggcaggtgagagataccgcacaggcattcctttctgtggagatgagcgccattggccagatggtagaagatgtggcccttgccgtgaagggcaaagcaacggtacatgtctatacggccggaatggttccgccgaaagaacagaggatcctgaccatggccagggagattctggatggaaaattagaggaggtgttctgatgggaaaggaatataaagggccggattgcatcaagggatcatccggatactgtgcaggctgcgggcacggcattatcaaccgtctcatcggcgaggtactggaagagatgggactggaaaaaaagacaattatatctctggcagtagggtgctcctgcatcatgggagattacgtagaggtagataagattcaggctccccacgggagggcgccggccaccgcaacagggatcaagaggatgcggccggataacctggttctgacgtaccagggggacggagatatcgcttccatcggctgtgcggaaatcatccatgcagctgcccggaatgagaagattacaactatatttgtcaataacggcgtatacggaatgacagggggccagatggcgcctactacccttcccaatcaggtgacggccacctcacccagaggaagagataccagtcttactggaatgcctgtaaaactgtcggagatgattgccgtgctgccggttgcctatgtggccagaggctctgtacataatccggcatccatcaaaaagacaaaaagctatatcaaaaaggcaatccaggcacaggtagacaaagaaggcttctctatggtggaggttctggctccctgtcccaccaactggcatctgagtcctctggcatccatggaaagaatcgaacaggaagtaatcccctactacacaccgggggaactggtcaaaaaggagggagtctgatatgcatgagattttatttgccggttttgggggacagggcgttctcgcagccggagtcatattggccaatgcggcgctgcgggcggacctgtacacgacctggctgccggcctacggaggaaccatgcggggaggcacagccaactgctcggtaaagatagcagaggaggagatcgccagtccctatattgatgaaccggatattctggtggtttttaacgagccgtccctgaagaaatttgagtcccaggtgaagccggggggatctatctttgtaaacagctctctgattcacagggaggtggagcgggacgacgtaactgtggtaaaggcacctgtcactgagctggccgccgcactgggaaatgccagggccgccaatgtctttatgacgggggtacttttatctcagattcctctggtatctgctgaggccgcctgcctgtccctggaagaatactttaagcctaagggagaaaagatgatcgactttaataaaaaggcacttctggaaggatatagacagaaggagaaagtggaggtggacgtatgaatctgaaaagtcttctccgccctggttctgtagcagttatcggcgccagtgaaaaactggggtttgggagagatgcctcagagaatcttatgaagggggatctgggagatcagatctatctggtaaatcccaaaagagaggagattctgggtaggaagtgctacaaaagcattgcagaaattggaaagccggtggaactggcggtgatctgtacgcctatgtcaacagtcaatgggcttttgagagaggcggctgcctgcggaacgaaggcagcggtggtctatgccagcggctacagtgaggcaggagaagaaggaaaggcggcgcaaaaggaactggcagaggtggcgaaggcctgtgatttggcagtgtgcggaccgaactgcggaggctttatcaataaccgggacggagtatttgccttcgggcttttaatgccggagaggcgaaaggcgggaaatatcgggctggtttcccagagcggacaggtatgttctcttctggcaagtgttccgtatctgaacttttcctatgccatatccagcggcaacaatgcagtggcaggggtggaggattatctggaatttctggtggaggatgatgctacaaaggtaatcgccgtatacctggagggagtcagacaaccggagcggtttgtgagaatcctgggggatgcggccaggaagaggaaacccattattgccttaaaagtaggcgcttcggagaaggcaaggcagacaaccactgcccacacaggaagcctggccggctccgacggtacattcaatgcactcttcaaaaagtatggggtcatccgtgtggatgacatggaggatttggtaaatacctgcctggtgtttagcacactggaaaagcctctgaagaacaagaatctggctatcatgaatgtctccggaggggaggccgccatatcagcagatgtgtcacagctgcagggggcaagccttgccaatctgtcggaggatactctgagacagattaaggaaatgcttcccgggtacgccacacccaacaaccctttggatatgacggcaacccttgtatttgagattaataaatacaaaaccgcggtgaaactcatgatggaagatgagaatgtaggggtaatagccatgggacataatcctccggaaaagatacccgagagagaccgggaggttgactttggctttgcagcggctctggcagaaattaaccgggagacagaaaagcccattgtgattctgccgggtatgtccagaaaaagagatccggaattgagagagttttacggagaacatcatattcctattctggacagcccgaagtacggtctcagcgctctgcgccgttatggagaattctgtatgtattccccggatgaccggacgcttataccggcggtacctccacagaacagagacacaaagagctgtattctctcagagcatgagagtaaacttctccttaaagacagcgggattccggttccggatgagattgttgtgacagctgccggcgaaatcccccgggcggcagaaaaactgggatatcctctggtaatgaaaattgattctccggatattcctcataaaaccgatatgggaggagtaaaactgggaatcacagatgagaaagaagccattgccgcttttgaagaaattatgacaaatgcacggatccataaaccccaggcacgaatccggggagtgctcatgcagcagatgcttcccaaaggaacggagatgattctgggaattaaccgggatcctcaattcgggccaatggtgctggccggtctgggaggaatctatacagaggtatttcaggatgctgctctctatcccgcgcctttgaataggaaggaggcaatggagatgatacagtcactgaaatcctatgccattctgaaggggtaccgtgggagccgtccgctggatacagaggcactggcagatatgattgtaaaattgggggacttggccgtggaacactgcggcgatctgaaggagttggatatgaatccggtatttctctatgaaaagggcgtgtatgccgcggacgcattaattgtgaaagggtaaaaaacaatttgggaggttttgtattatgagagatccatatgtagtaattgaatggtctgacagaaaaagcgaggcaaagggctggctggtgattgacagcattcgggatgagttcgctgccggggggctgcggatgaatgtaactgtaaaccgggaagaagtggagcgcctggcacaggtaatgtcttacaaatatgtggcagcggaagcggagattggcggtgcaaagggcggtatcatctacgattatcacaaagaggatgctctggaagttatggaacgttatctggaggcaatgaaaccctacctggagaacggcattaccgtgggagcggatctgggaaccagggcagaggatgtaagaaggataaagcagaaactgggaattcaggagaaggaaccaaaaactatccgggagaatccggacttggcagccagatcccaggaagtcattccacagatattgaatgagaccgttgagggactggatatggaccggttcgtaaccggatacggagtggcagtggcagctgacgaaggatggaagctgacctgcgggactccgggtgccactgtggccattcagggatttggaagcgtgggaggaagcgctgccctgtggctggaaaagctgggatataaagtggttgccatagcagatattaaagggatgtactacaatgaagaggggctggacatccgggatttgctggatgccagaaacaaactgggagaagtggatttggataaaatgaagagccgatgccaggtgagagaccgtgatgcatggctggatctggacgtggatatacttattccggccgcagtggaggatgtgatcaccagggaggcagctgagacgctgaaggcaggtctgattgtggagggcgccaatattcccactaccccggaggcagatgaagtaatcaaacagagggggattcatctggttcctgactttattgccaacctgggttctgtgtgcttctttaattccatagagagccgcaaatgtgagcctacccctcagggtgttatggaccggctggaggatgtgataagaagagacgtgcagaagaccttcgcctatgcgtcagagcataagatatatgccagagacgcggcatggattctttttaagccggaaatgtaaatggagaaagcccctgatgctgaaaggagttaaatagatggagaataaagggaaaaagatgagtcctctggacgttacgttaatggcggtaggagccattatcggtgctggtgtgttcagtatgaccggcgtagccgttggcgcggcagggccgggggtgcctatagcgtttttgattgcaggagctgcggctatgatggtgtgtcttcccttcatggttatctcttctgctatcccggtgagaggagggcagtatctatatgtggcccgtttcctttccccggttctgggattcctgctggtctggaatctggtctttgaaatattttatgtgagtgtgctgggaatttccgcgggacagtatctgcctaacatcataccaggtctttccccgcggctggcagggaccatcgtagtaatagggattgtgacagcctgtttgtttaacatccgtacctcggctaagatacagaactttatggtgattctggtgctcattgccctggggctgtttattgtcctgggaatcccccacatcaaacatatctcactgccgaaaatggttgccggctccagtttttcaggaattatcctggcagtcagctacgtgagaagttcagcgtacggggccgtaggagtggtggatcttgccggggaagttgaacatccccagaagacagtgccaagcgccattgccacgtctaccataggcgtttcggttctgtatgcagtagttgcctttatcgcggtaggcgtagtgccctgggaggagatgatccaacaacctctgtcttacgcggctaaaagttatatgcctgtgtggatcttcagcttctttgtgatcggaggcgcactgtttgctatcctgacaacactactttctatgattatgtcctacagccgtgctatctgggcggcggcagatgacggcctttttccaaaatggcttcagtcaaccaaccgtttcggaattccctataaaatcatcctgattatgggagccatcggtcttctgccggttgtgctggatctgcccctggactatgtgtttgccgtgatgaacgctcccggcatgatgctgggccttcttgccaccgtgccggtgctgattgccccgagaaaattagagggcaagtttgaacacgcatggttcaggatgccgaaatggatcatctggactctggtgctgggaaatatcgcgctgacccttgtgctcagcttcagtctgtttgctactttggatctgaaaacgattctggggattctcctgttctacggaggagggattgtatactttttcctcagggtaagcttgctgaaaaagagaggggtggatcttataactcagatgaaaacctatgatccttcctggctgaaggagaactaagggactgccgtttccggatctgttttaagccgggaacggcagtattgccgtatctgttcctgcccaaaataaattggaagctgtgcaaatgggagcctgttatgctataataaaaacattaatgtaaaatttattttaaacgttagggagaaggtatcatgaaacaacagcatacggcagtcaaaccagtgcataaagaattgctgcacgcgaaaattgcagatgcaataatggaatatataaaagtgaaccagctttcggaaggtgataaactgccatccgagcgtattttggcggagcagtttgtcaccagccggaattccgtgagagaggccctccgggtgctggagcgggacaatattattgaagtgcggcccgggagtggcgcctttgtacgggcccatgaggagtcagtctccttttatctgaagctgtggaaggtaaattatattgaaatcctggagattttggagattctggaagggaatatggtcaaaaaaatctgcggaaaactctcccgggaacagattcgtcctctggaggaatacctgcagcagatggagcaaaacgcggagaaaacaggtacatttctccatgaaacggatatattattccaccaaaccatgagaagctattccaagaatcagacgctgattcagctgattgatgaactgattcagtcgctgcactcctattggaagaacctgaaaggggaggatgcccaatggatctccaccctgccgtaccaccggaagctggtggaggctatcagggacggagaactgagagaggcacagggtgctttgaaaaaaatctgtgacattgacaaggatattacggaatatctgcaggaatctaatggaaaatagcacaatggaggggctttctctacagccgctccttttttgcgtcttcagacaggaacggcatttctgaatatatccttaagattccccggtcccattgacatctctcttgtccccgtgctatatttcaagtgtactaattagaatagtacacttgatacacttacttgaaaagaaagaaggagcctctatgatagtgattgattaccagaatcgaaaaccaatctacgaacagattgtagagcggtttgagctgttgattgtaaggggaatcctggagccggatacgcagataccttcggtgcgttctctggccatggaattgtcaatcaacccgaataccattcagaaggcctatgctgtcctggagcaggaggggtttatttacgctgtgaaaggaaagggaaattttgtttccggagataagaagctgctgatcgaacggagaaagacgacgtttttcctggatttgcgcaatcttctaagagaagggatggacatgggagtgtccagagacgagtgcgtaaatgaggtggagcatatatacgaggaggggatattgtgatacgggcagaaggaattcggaaaacattcggctgcagaaaagccattaataatattacggtaaccattcaggagggaaatatttttggactggtgggcaccaacggggcgggcaaaagcaccttcctgcgcatcctcagcggtgtactaaaaccagaggctggtaccgtcaccattgatgaactgccggtatttgaaaatgagaaggccaaggcaaagatttgctttctgtcagatactgcctacttttttccgggggcaacacccaaatccatggcacattattacgggattgtctatccggaatttgataagaaaagatttgatgaactgctgaacaaattcggcatggagcaggaagccaagatcaatacattttccaaagggatgaaaaagcaggtttcggtgcttctggggatatgcaccaatacccagtaccttttctgtgatgagacctttgacgggttagacccggtgatgcgtcaggcggtaaagagcatctttgcgtctgagatcctgaaccggaactttacccctgtgattgcctcccacaatctgagagagctggaagacatctgtgaccacgtgggactgctgcaccagggaggaattcttttgtccagggatctggaggatatgaaattccatatccagaagattcagtgtgtaatccagaacccggttctggaggaggaacttctgcgggaactggatgtgatgcagcatgaaaagagagggtctcttttgaccatcatcgccaggggaaccaaggaggagattatggagagagtagagagtaagtatccggtgttcggagaagtgcttcctctttctctggaggagatttttatcagtgaaacggaggtagcgggatatgacatcaaaaatctcatttgctaaattattaagagaagatatgaagcgcagaagctggctgctggctctgtgtaccgtagcgttctttctgctgggaccggtgatctgtctgatgaatctggaaagccagttcagaagagtgcggctggatatgggacaatacacgctgaaagatgtgaaagagtggttcctgggatttgtgggatttaacaatggactcttgatggcggctgtctgcatctgcgctgtgctgtgcgctgttaccggataccagtatcttcattccagaacgaaagtggatttgtttcacagcataccggtaaagagggaaaagtttttcctggtacagtacgtctcaggtatcctgttctttctgattccttatgttctctgcatggtgctgtgtctccttatcggggcctttcagggggtggtaactgccagacatgtgctgtactgtaccggaagcataggactgggtatcctgtatttcctcatgatttaccatgtggccatactggctatgatgctcaccggcaagctgctggtggggattctggggactgccgtattctgcggggcaggtacggctctaagtatgctgcagaccaggctcttccaaagcttttacgatacttattttaccacggtcagtgaaacgggtacggccatacggtcagccctgtctcccatagaaggatatttctatgccgcgggccgcctgggaactaaaggaaagtttccgggagtatttttattggctgcgctgatgattgccattcttttgctggcgctggatctctggctgtataaaagaagggcttcagaggcggcagagtctgctatggcattctccaagacagaagggattgtcaaggtatgtatgattgtgcctgcctccctctgggcagggcttttgatgggcagcttcaacacctatgacagcagtgtgaacatagggtggtttatcttcggggtcctggtttccctgatcctcctgcacaccatcgtggaattcatctaccatatggatttcagggagatcctgagaaaaaaatggtctctgctggcagcggcagtgctggcctttgggtgttccgcagtatttttctttgaccttacaggctatgacagctaccttcccagggaggacaagattgacggaatgtccgtctataccagcaatttcaacggacgcttcagctatccctatgattcagagctcagctacaatacgggcagtgaacagagaatactggatcaggttaaggtaaaggacttccagatgatatatgatctggcacaggaaggggtaaagaataaaaatctgagaaaagaagtatacgccatggaggagtcccgcattgccgtgtcacgggcaaagctgggagaaacaagcagcgaggaacagtacgataatgtgtttattaaatatcacctgaaaagcggcagggatgtttaccgcaggtattttgtaaaatatgaaagctctgagaagtgtatagagcagctgtgcaataataaggagtataaggaaagtctctttccgattaattatgtgaaggaagaaaatgtaaccaagtgtacgctgactgaccggtaccagagagagaccatactgaagctgacggatgaggagaaggccagactgatccgtacattccgggaggaacaaaacaatgcttcctacgagacaatgacccagggaccaattgcaggagtattgtctatggaggtaaaggaggatgagtacagtacctccatgtaccagtacagcatcagcccgggatacacggataccatagcccttttgcgggagttcggaaacgggatggacgaacagtggaagcctgaatatgcagagagcattcagattaccaattactatgagtctggaaccaataccccgcccacggcttctttcacagagaaagaggacatcgcagagattctgggtgcattgacctggggaggggaatatggtccggtgaaagagggcacagattattctgtagaagtggatgtaacctggagtattgacggggccagatcaaacggagtctactactttacagaaggaaagatacctgagtgcgtgatccgggcatttgaatagcatggctttattcttcaaattcaatatccgggaggagttcaaagtaaaagtcctgatattctttggccagctcccggataatcaatgactgcagggcctggaatctccgtatggagaccaggtctttttcaaatgtgatatacacgctgatccagagctttcttccggtgcggacaatatcataatagagctgatgatagccgtgctgttccagaatgggagtgacgatctgcttcacagactcaaccgtttcttcctccggcgccagcaaaaagaggtctctaagaccggtgataatggcccggatgggagtgggcagcataaaaactgacagtacgatagcaatcacctgatccagatagggggtaaaggccacaaaccactcagcggtcagaaatgcagggagaaaaaatgccagggacattcccagggatgcgcaggcatcgattttccactcctggatttccatgtctaccagccgtgaagagagggaacggtttcttttgttgagcaggacgattatgattacgctcagtactgtggcaaacagctcaaaataagcgatttgcccgaatgccacatgacgtcctccgtgaagagcgatctccacattgttcataatgagcccgatggttactgccaccatcataaagcccttaatgaccacaaaaagggactcaagctgaagatatccaaagggatgcttttcgttggaaggacggtagagcagcgggatcaggctgatggaaatgaggatcataaaaagctctaccccgtcatacaccgcatccagcaataccgcctgggagcgggtcacaaaggccattatgacttccagagccacaaaaagaatccctccggtgagggagatgttcatcgcccgtttttcagtttttatttgtcgtttcggagcatgcatactttcacctctatttttttccttaaaataattatacaggctggcaatttttacagcaaccttgtttctgcaaaaaaacagattgtactattgtactaatactaaaatattaaaaatcttgacaaatacatgcactgtatttacaattataagtgacaacctgaatagcttatgaaatataaaaggggaatcccttttatgggaacaggaggagaaagtgatgaacaaaaaagcgaagggcaagggactgctgcaggtgccagggattattctgattatcttaggggcatttacgctggtgagcggcgtaatatctgtctttacggcaaggatggccgcatcggacggaggagctctgattgagagtatgaatgccatagccaaatcccagggaatcaattatacctatacggcacagggactgatggttgcggccattatggcactggccaccggagccatattcctagcaggcggtatcatcggcgtggccaactgcaacaaaccccacaaagcccagatatgctttatcacgggaattatcatgattgtggtagttcttgcacaggctatttatcaggccatgaacggcagcttcggaattctgggtactattataaacctgattctgcccgtcttgtacctgataggggcaaataaaaataagcagatgctggaacttatggagacgacttctgccggcacctcagaggaagtacaggagtaaaaatatgaagttacctgcatatgagcacaaagcgcagtattatgagacggatcagatggggatcattcaccactccaactatatccggtggtttgaggaagccagggtatctttgatggagcagatgggagtaggatatgaccgcatggaggctgagggaattatgagccctgtgcttgcggttgcttgtgaatacaaatctatgaccagattcggtgagaccgtggatattcatacggagattacaaagtacgacggaatccgtctggagctctcttatgaaattatggatcataccacctgtgagcttcggtgcagagggagcagcagacactgtttcatggaaaaagatggaggaaacctggtgtctctgaaaaaaagcaggccaaaattccatacattatttatgaaggcaattgcagaagcagaataatgccccgggggttacagaccccggggtgtttttttgccgtcggacggacggcggcagcaaagcaaatatatgctatctacttgacaagctcccgccaggtagagtagaatttatcatagcaaaatagtaggaaaagaatcccggccgtacaagtaaaaacagccgggggaggtaagaaatgaagatatcagcgaaaggaagatatgctctgcgtctgatgattgatctggcagagcataacagcggagagtatattcctctgaaggagatctccaggcgtcaggagatttccgtcaaatatctggagcagattgttgtaatccttggcaaggccggttatctgcgaagcaccagagggcctcaggggggatatatgctggcaaaggatcccggacaatatacggcgggagatatccttcggcttatcgagggaaaactggcaccagttgcctgtctggaagatgagacaaaccaatgcctcagacaggaaacgtgtgcaactcttaaattctgggagggtctgtaccgggtaatcaacgagtacgtggattctgtgacgctgcaggaactggcagaggagcataggaagtcgggggcattggattttataatataatagagtacggagtgtaagcaaagtgaaattgtatcttgattttgacaaaaaaaaggaattatgcagtttgggaaaagcgctgtcctcagaggtgaggatagagatcctgaaactgctggaacagcagtctctcaatgtaaatgagattgctgaaaagctggagattcccgcatcctccgcggcgatgaacgtaagagttctggaggaagccgggttaattcgtacagagcttagaccgggggtaagaggctccatgaaaatctgcagtaagcagtgcggagaagtgaagatcctgctgaaggagaccggtacggacgcacaggtagaggtgattagcatgcctgtgggcaattatgtggactacgaagtatcccccacctgcgggatggtaaatgacacggactatattgacggggaggatgagcccaggtgcttttataatcctctgcgcaccacagcccagctgatttggttcggggcaggatacgtagagtaccgtttttccaacgcgggagtgcagaaaaaggaactgaagatggcggagctgtcagtggagctgtgttcagagacggcagattatgatctggactgtccttcggacattaccctgtggctgaacggcattgatgcgggaacttataactgtcccagtgactttggagggagaaggggaaagctgaatccggattggtgggaggacaaaaatactcagtttggtgttctgaaaacctggaggatcgatgagacgggaacctatctggacgatgtaaaggtcagtgactgcagcattgaagagtacaggatgacagagactccttatatctctgtgaggataggtataaaaaaagaggcagagcatatcggaggggttaatattttcggcagccattacggagatcacccccaggatatccttttaaaactgcactactaaacacaggaaatttcgttattttcacggcacggttttgctttacttttcaatctcatatggtataattgggttgaaaagaacaagaaaagtgttttaaaacaatataattattccgtaataagagaaaggaatgggactatgcaggaaaaactgatggagaaattcaaggagctataccaggacggaggggacatccgcacctatttttcaccggggagggtaaatcttatcggggaacatacggattataacggaggtcatgtatttccctgcgctcttaccattggaacctacgggattgccagaatgcgtgaagacaggaagctgcgcttctactctatgaactttgaagctcttggcgttgtggaaagcagcctggaggatctggtgtatcaggaagaggcaaactggaccaactttcccaagggggtgatctgggctttccgggaacacgggtatgaggttccaaagggtatggatctccttcttttcggcaatattcccaacggttccggcctttcttcctccgcgtctgtggaggttctcacgggtgtgattttaaaagatatgtttgggtttgaggatgtgagtatggttgacattgccctgtacggacagtatggagagaataaattcaatgggatgaactgcgggattatggatcagtttgccatcgctatgggcaagaaggatcacgctatctttctggataccagcacactgaactacgagtatgccccaatcaggctggaggatgccaagattgtgattgcggccagcaataaaaagagaaggcttacagattccaaatacaatgagcgccgaagcgaatgcgaaactgccctggcccagattcaggaggtggcagatatccagtctctgggagaactggatgaggttcagttcgaaaaagtaaaaggcgcagtctttgatcctgtgaaggcaaagagagcaaagcatgcggtctgtgaaaatcagaggacggtgagggctgtggaagccttaaagtccaatgatctggagaccttcggggagctgatgaatgagtcccatatatccctgagggatgattatgaggttaccggtccggagctggatacattggtggaagcagcctggcagcagcccggagttatcggatcccgcatgacaggggctgggttcggcggctgtaccgtaagcatcgtgaaaaatgaggcagtggatgcgtttattgaaaatgtggggagcatatatcaagaaaagataggctatggggctgatttttatgtggtagagatcggtgagggagcccgcagattatcttaatggggaaaggtgagagaatgagtctgaatcagaatataaaaaggttagtacagtacggtattgagacaggaattcttccggcctgcgagaagatatatgcggccaatcttctactggatttgttccgtgaggacgaatatcaggagccggaggaagactgcagcggggcagacctggaagagatcctgggagctcttctggatgaggcagtaaagcggggaatcatcgaggacagcatcggataccgggatctctttgacacgaagattatgaactgtctgctgcccaggccggcgcaggtacaggcagagttttttgaaaaatatgaggattctccgaaagctgccacagagtatttttataaattcagccaggacagtgattatatccggagataccgaatcaaaaaggatcggaaatggaaggtggagagtccatacggccagattgatattaccatcaatctttcaaagccggaaaaggatccaaaggccattgccgctgcgctgaatgccagacagagcgcttaccccaaatgccagctgtgtgcggaaaacgaaggatatgcggggagactgaatcaccctgcaagggagaaccacagaatcataccgattaccataaacggcagccggtgggggttacagtattccccttacgtttattacaacgaacactgtatcgtatttaactttgcacatattcccatgaagatagacagatctgcttttgtaaagctgtttgactttgtgaagctcttcccccactattttctgggatccaatgcggatcttcccattgtagggggatctatcctgagtcatgaccatttccagggaggacactacacctttgccatggcaaaagcccctatagaacggcgggtgacgattccgggatatgaggatgtggaggcaggtattgtaaaatggcccttgtcggtgcttcggatccgctgtgaggatgaaaaacggctgattgatctggcttcccacatattggagatctggagaggatatacagatgaggctgcatttgtctatgccgagacaggcggagtcccccataacaccatcacgcctatagcaagaaaggtggggaatctgtttgaattggatctgaccctcagaaataatatcaccacagatgagcatccccttggagtgtatcatccccatgcccagtaccaccacatcaagaaggagaacatcggccttattgaagttatgggactggcggttctcccggcaaggctgaaaggggagatggagcttctggcgggatacatactggagggaagagatcccgcggagcatgaggacttagagaaacatgcagcgtgggtaaaggaattccttccccgatatgagtctgtaacggaggataatgtgatggagatccttcaggaagaaatcggacaggtatttgtaaaggtactggaggatgcaggggtttacaagtgcactccaaagggccgggaagcgtttatgcggtttatagagacactgtagccaggccgtacagattcacaatatcctgatttctgcatagaatgaaaggaccatatgtgaatcaaaaggaaacgagtatgcgccaatccagaaattatatgttcagcgatgtccttcttggcactccggatgcggttgccaaggtaaagggagatgaaaaccacagaggcctggtgggatatgtgtatttttacggaagtgccggtggctccctggtactggccgagatcgagggcctgccctatgaagatcagagatgtcccaatggaatctttggatttcatattcacgagggtcattcctgctcaggaacccctgaggatccctttgcagacacgaaaaaccactggaatccggaggggtgtgagcatccggagcatgcgggggatatgccctctctgttcgggaaccggggatttgcctggatgatgttctatacggatcggttttatccggaggaggttgtgggcaagaccgttgtgatacatgacatgccggatgatttccgtactcagccctcgggagattccgggatgaagattgcgtgcggagaaattatttaattaactgtggaatcccattggaaataaaagccaaaagctgcctggaaagtatcggaactgccaggagagcttttggcttttggtttatcggtaacccaaaagcatggaatgctacccaaaggcagtacaatcctataatgggagatgctatgattgatagagaataattttttactagcaaaggagaaaagggtatgaggatgaaaaaagggattgcgtccgtattggcggttgtgtgcagcttaagtattactgcgacagtttttgcaggtactggggaaactgttcctgttcagtctgaaattactgagaaggcagagcaaaaggaccaggaaaaagagaagcagaatacagaagggaatactgtaaaaaaagaggaaagtactgcgaaacccggacaaaaggagaacaaggagaaagataaaggaaaaaccccggataaaagcaaaacagaggataaatcttcagaggaaacaggtaaaaaggaggaaggcgtaccaggggatagcaagaacgatgaaacaaatacagaagatataaaaaagaatgagaaaacagacgaggaaaagaaaaaagagtctgtaaaggaaacagaaaatgagaaaaaactgccggacagcacccagccagaagaaaaagcaaatgtcccggcagcaaaaggtatagcggctatgcctaaggctgtgccggcgaatgtggatgttcctcaggcaaaagcaggaaacagtaatacggaaatattaacgagtatgacttccgggttaagctgggcagggagcggtacaaaggacgatcccaagtcccccatttacccgaatgaatattataagagaacaagcaggaacgtgctggtcgttcaggcagtggacagcggtgctaaagtaaatgatcaggatcagcagatttctcttcccctgtcttatgggacaaatatctgtgaattctatgtccgggcttctgacgggacaacggtggcctattattccatggaagtgtacagaaataaagccggccagaatgactggccaagggatctgggggttgaagcacccagtgcacccggggcatcggacggcaagattctttatctgaagagcgatgttttgtatgattacagaatagcaaaaggggagtggaaatctgtaccggcgggaagcacggagatccccaatctggcttcaggatcttatgaggtaagatttgctgagacagatacccagcaggccggttataatgtggcaagggtatatatttacgagagagaagagtataacattagtgtggatgacggacttccggatgaaataaaaaattccattgagataccggacaaggcagcctacggctcttccgtaaccttgaagataccgtttacatcccggaagctggtgactgaagtcggatataagataacagccggaggtacttttggaggaaccctcacaggatttgactattttgaagggaatacgtatgtgctggtatttaccatgccgaaaaacaacgtacatatagacgagattattgtggacgaggcaggaaactggcataccataaccaaacaagacggcggggtataccgatttatacagatggacgctaccgtgcagacccccggggacatgatgacaaaaaaggatgtaaaatatttcagacacggtacccaggcagagatttcactgacctcatactcagatccccagtcttatgaggtaacctcttttgaggtcaaagacagtaagggcaatgtggtggcacggtctgctgacggaagcaaaatttctgtgactgcagaggatgatctgacagtcgtccccggaatcacagtgcattatgcagatctgacagaactcaataagcttctggcgcaggcgcccacccaggaggaattgagtctgtatacagacgacacggctaaggagatggcggattgtctggctcttgtgcctaatatgtcagatgtactggtctccagtcaatggctggtggatgactttgcagcgagggtacagaaggcattgaatgctcttgtttacagagatgtggattatacgaagcttcaggaaagcctggaccgtattccgaaagacacaggagattttacggaagaaactgtaaataaaatgaacaagctggctgaagaggcgagagacgccattggcagtaagtgggatatccgccggcagggcgatgtggacaatctgacggaggcattaaacgccgcaattgatggcttgaccatgcgtccggcggattacagcaaagtggaggcagcaaaaaagaaggtaccgaaggacttgagtgtttatacggatgattccgtgaagaagcttagaaaggcactggatgctgttgtggaaggccttggctttacccatcaggaagaggtggacaagatggcggcggatatagagactgctgtcaaagctctggtcaaaaagaaagcagaagatccaaataaaaagaaacctgttacggaacccaaaaaagatacaaaatctgatgataagaaaaatacaaaaagccccaagacaaaggatgaggcccctgttcttcctctgacgatcctgtgcgcaggcactggtctggcggcactgatcatcagacgcaggagaaagagcaaaaaggcataaagaagaggttttattccatccaatatgtgatataatgtgcatgagcgaggtagcaatgttgttataaatgatactaaaggatggaagatgtatggaagtaaaacgtgtagatgattctttgacagagcagacgtatctgctgatgccaaagcacagcaatggatatggaaggctgtttggaggaaagctggtagagtggatcgatgagatggcggggattgtatcccgccgccactgccagacagagaccactacagcctgtattgacaatctgaactttaaggccagcgccaagacaggggatatgctggtgcttcggggaaagatgacgtatgtgggaagaacctccatggaggtccgggtggatacctatgtggaggatttaaacggacttcggaagatgattaaccgggcatatcttgttatggtgtctgtggacgagaacaataaccccataccggttccaggccttgtaatcgagacagagtctcagaaggctgagtgggagagcggtatgaagcgttacgcactcagaaagcagagaagaaaagaaggatattaatattgaatttatgccggaggctgaaacagggcaaggtccggaggaaaaaaggaagcatatacaaagaagagaaacagggcagccaggagagcgcaggagatccactctcccctctctgttccttttctctggaacggggagttcgtaagcaggcgcagactgagaaaacaggaaagccctgcagagatgagaaatacggcaatgtcggctgccagatagtttttgcccaggatacctgtataggtataaaaaagaattgggatggcgcatagtccggcaaggagacttaacaggtgcgcggtgaaaaagcgtggatatgtgtttctgagcagaagtctttctacaaaaagaaagacgagataagggaaaaataacagcttcagatgctcccaggtggattcattaactggtgagataaaggcagccagggggttttggcctgaatattcgtataaaaagtgcagaaggcttcccgctgcggccacaaacagaaagccggcccagtgaagatacttgattttccggtgcataggtctctcctctttcctcaaaataatacagagctaagtgaacaataaaaggttctacctgataatttatgcagttttttgggctttatcctaaaaaacagcaaaggacaggtggaacttttttctattacagggtatacttaagggaaaagagtgccaaaaggagagtgtcagaatgaatccagcatataaaaagcttatgaaatgttatgactgttttcagaagaaaataaattttaagccccgggcagcactggttctgggctctgggctgggagattacgcggaaacgattcaaattgcagatacactggactacaaagagatagaaggatttccggtctccacaattccgggacacagaggcaggtttgtctttggatatgtgggagaggtgcctgtagtgattatgcagggaagagtccactattatgaaggatatcccattgaggatgtggtgctgccggtccgtctgatgaagcttatgggggcagaacttctgtttctcaccaatgcggcagggggtgtcaattctgtgtttcaggcaggagattttatgatgatcacagatcacatctcaaattttgttccctccccgctgatagggaaaaatatccccgagcttggggagcggttcagtgatatgagccaggtatatgacagggagcttcaggaaatcatagaacatacggcggcagaacagcagatcccactgcagaaaggcgtgtacatccagcttacaggccctaattttgagacccctcacgaggtgaaaatgtgccggattctgggagcggatgctgtaggaatgagcactgcctgcgaggccatggcggctaaccatatgggcatgaaaatctgcgggatttcctgcattaccaatctgggatgcgggatgacggaccagcctctcagccatctggaggtccaggaaatcgcggacaaggctgcccccatgtttaaaaagctggttacggaaagtattttggctatgaataaaattttgtagaagaaaagagtgtatcagaaaataaaaccagacagattataggagaacttatgagtgaaaaaattttactaattgacggacacagtatactgaacagggctttttacggcctgccggatcttaccaacgcggaggggctgcacaccaatgccatctacggctttttaaccatattatttaagacactggaagaggagaatgcccagtatctgaccgttgcctttgacgaacacgcacctactttccggcacaatatgtatgaggcttacaaagggacgagaaagcctatgccccaggaactgagggagcaggttcccattatcagggatgtcctggaggctatgggagtaacgattgtctccagggagggctacgaggcagatgatatccttggcactctggccagaaagggagaggcggcaggcatggatgtcaccgtgctttcaggagaccgggatctgctgcagctggcaacggagcacgtgaaaatccggattcccaagaccagagggggcaagacaaccgtagaggactatgacgacaggggggtgctggaggcttatcagctgacgccgccccagatcattgagctaaaggcccttatgggtgattcttccgacaacataccgggtataccgggggtaggggaaaaaacagccactaagattctgctggagtatgggaccattgaaaatgcctatgcccatgtggaagaagtcaagcccaacaaggcaaaggaatccttaaaggaacactacaacctggctaagctgagcaaggaactggcaaccatctgtacagactgtcccctggattacagctttgaggaggccagactgaaggatttgtttacccaggaggcctatgaatggtttaaggaattagagttcaaaaaccttttaaaccgctttgagagtccctcatctaaaaatcaggcagaggagcattttcagaggattaccgatctctcacaggcagatgcctttttgtctaaggcaaaaaaagctgaccgggccggagtgcaccttcttctggagaagggagaggttttgggtcttggagtggccctgggagaaacggagaagacagaagcagcatttttccctgtggagggatttctcacagaaagatatcttctggaacagctggaagggatctgcaggggggctgggcagacagcttctctgaatgtgaaggagatgctcagtaagatacagattgaagaacacaccaggatgttcgacggaggaatcgccgcctaccttctgaatcctctgaaatccgcctatacctacgacgatattgccaaggagtaccttggacttatggtgcctgcccgggaagatttgctgggaaaagtttcctataaaaaagggctggaggagaaagaagaggaagtgactgtgagctgctgctacatggcgtatgtggcgctggccggtatagagcctttgacaaaagctctggaggagacagggatgctttcccttttccgggagatggagatgcctctgttattcacacttcatgacatggaagcagcagggatccaggtggaaggggaggaactgaaggagtacggaagccgtctggaggtcaggatcaaagagctggagagtattatttaccagaaagcgggggaggaattcaatatcaattctcccaaacagctgggggttatcctttttgagaagatgcagcttcccggggggaagaagacgaagaccggctattccacggctgctgatgtcctggacaaactggcgccggatcactctgtggttgcggatattctggagtaccgccagctgactaagctaaagtccacctatgcggacgggctggcaaattatattggtgaggatggaaggatccactcgaattttaaccagacgataacggcaacggggcgcatcagcagcacagagcccaatcttcagaatattccggtgcgcatggagcttgggcgcctgattcgaaaggtatttgtgcccagggagggctgtatctttctggacgcagactattcccagattgagctgcgggtgctggcccatatgtccggggatgaaaaactgatacaggcttacagcgaagcccaggatattcaccgcatgacagcctctcaggtctttcacgtaccctttgaccaggtgacggatcttcagagacgcaatgccaaggcagtgaactttggaatcgtatacggcatcagttcctttggcctgagtcaggacctgagtattacgagaaaagaagctgcccagtatatagagaattattttgagacgtaccccaaaatcaaagggtttctggatggcctggtaaagcagggaaaggagcaggggtatgtgaccaccctgttcggaagaaggcgtccggttccggagcttaagtccagtaattttatgcagagatcctttggggagcgggtggccatgaatgcgcctattcagggaactgccgcggatattataaagattgctatgattcgggtcaatgaggcccttaaggagagaaaactgaggacaaggctggttctgcaggttcacgatgaactccttttggaagtgtatgaggaagaactggaggaggtgtcccgtatcctggaaaaggaaatgaagcaggctgcggacctggcagtgtctctggagatagatatgcataccggaagaaactggtatgaggccaaatagggccgtgaaataaaggtagaattccgctgtaacttatgataaaatgctttcgtgggtgtccgaaaccgggaagggtggggcaccccggcaggaggaggaagcgtatgagagtgattggaatctccggaggcgtgggctccggaaaaagttccgtgctgaactatattgaagagaattatgacgccagagtggtgcaggcagatgaagtggggtatctcctgatgcttcccggcggtgactgctatcaggaagtaattgagctgttcggagagtggattgtgatggaagacggcactctggacagaatgaagattgcagagattgtatttcagaaaagagagatgctggaccggctggatggtattatccacccggcggtgaaggaatacataaaaagggaagtggccagggcaagaaaagaagatgtgccttacttttttatagaggcagctctgctgatagaggaaaaatacgatgaaatctacgatgagctctgggtggtatactgtgagcctcaggtgcgcagggagcgcctccggaatgaccgggggtatacaaatcagagaatcgacgagattctggccaatcagctcagcgatgatgaatatgaagctgccgcagactttgtactttacaacagcgaggatgtggagcatacccatttacaaatcgaccgaaggatgagaaaatatgaaactatgtagtatagccagcggcagcagcgggaactgtatctgtgtaggcagtgacaaaactaccctgctggtagatgtgggcatcagcaagaaaaaagtagaggaagggctcaacaccattgatatgacagggcgggatgtgaacgggattctggttacccatgagcactcggaccatatcaagggacttggagtatttgtacggaagtatgaagtgcctgtgtacgctacgccgggaaccattgaagagattaaaagatgcagttccctgggaaaactgccggaaggcattttccgtcccattgaggcggatgagaattttgagatagaggatttgaaggtagagccgtttactatttcccatgatgcagcccagcctgtgggatataggatccgccatcaggacaagtctgtggggattgccacggacctgggaaaatacacggactatattgtggaaaagctggccggatcggatgtgctgcttttggaggcaaatcatgatgtgaatatgcttcaggtggggccgtatccctactatctgaaacggaggatactgggagagcggggacatctgtccaacgagctggccgggcggcttctgtgtgagctgctccacgacaacctgaagtctgtgatgctgggacatctgagcaaagagaataactacgagaaactggcttatgaaactgtatgcgcggaggtgaccatgggggataatccttatcactccaaagatttccccatacaggtggcacacagggaacaggcatcagaaatgatctgcttttaaagctttcatacataggaggatgtgaaaaaatgaaaaaaaccattattactgtagtaggaaaagatacggttggaattattgcaaaagtatgtacgtaccttgcggaaaatcaggtaaatattctggacatctcccagacaattctggatggattttttaatatgatgatgattacagacgcgaccaaatctcccaaagagatcggggagatgggaaaagaactggaaaaggtgggagaagagatcggtgttatgattcgctgccagcatgaggatatttttaacaaaatgcaccggatctgagacggaagatgcaggattgacaaaggaaggataagtacatgattaatatatttgaagtacatgaaaccaacaagatgatcgaacaggagaatctggatgtacgtaccattacacttggcatcagtcttctggactgtatcgattccagtctggaggaggtaaaccggaaggtgtatgagaaaatctcccgtctggccagaaatctggtaagcacaggggatgagattgaaaaagaatacgggattcccattgtaaataaaagaatttccatcaccccgatctcccttgtgggggccgccgcctgcaaaacgccggaggattttgtgacacttgcgcagacgctggatcaagtggcaaaagaggtgggagtgaattttatcgggggatactctgctctggtgtccaaagggatgactcctgcggacgagatgctcatccggtctattccaaaggccctttcagtgacagagcgggtatgcagttccgtgaacctgggctccaccaagacaggaatcaatatggatgcggttaagcttatgggtgagattatcctggaaaccgcagagtataccaaagagcaggactccctgggatgcgccaagctggtggtattctgcaatgcaccggatgacaatccctttatggcaggggcattccacggcgtcacagaggcagatgccatcatcaatgtaggcgtcagcggacctggggttgtgaagaccgcactggaagctgtgcggggaaaagactttgaggtgctgtgtgagacaattaagaaaaccgcttttaaggtcacgagagtaggtcagctggtagctcaggaagcatccagaaagatggggataccatttggcatcatcgatctgtctctggcgccgactccggctgtgggggacagcgtggcagagattcttcaggaaatcggcctggaatacgccggggcaccgggaaccacagcagccctggcccttcttaatgaccaggtaaaaaaaggcggggtaatggcatcctcctatgtaggaggcttaagcggggcatttattcccgtaagcgaggaccagggcatgatcgatgcagtgctggccaatgccctcaccctggaaaaattggaggcaatgacctgcgtttgctccgtagggctggatatgatagccataccgggagatactaaggcatctaccatatccgggattatagcagatgagtgtgccattggtatggtgaatcagaagactacagcagtaaggctgatccctgtgattgggaaaaccgtgggtgataccgtggaattcgggggtctgctgggatatgcaccggttatgccggtaaaccagtattcctgcgaagcctttgtaaaccggggaggaagaatcccggcgcccatacacagctttaaaaattaaaatacaaaaggggacagggcagtctgaaaatgggacacccttcttctattttgggacgtgttcctcgcagaaggaacacgtccccttttttcctttttaacttcctgaatgggcataaatcctgcgtatttggtagattttaaaccttttctatcatgatataataaatctatataggtataagacaggaggaaaagaagacatgagagggaaaagaaaaatgcgttttctggccatgctgatggcggtgatcattggcgttacatcactgtctgactcagttttggcagccttcagcagtacggcgcaggaagctgacgccagggatacgctgaagaagctggaagaaggtcaggagattgatgcccaggatgccaaatatatattggaacatttgggtttatttaacgaggacggatccgcaattacatcaaaaattgttatggatcaaaaggaatattctctggaggagattaaggagtatctgcagggagattctgtggatcttaagaagaaggtgtctgtggacggcacggagctgaccctggaaaatgtccagactatgctccggattgaggaagagctgtctaagtatcaggagacatatttcccggaacatacaggggagtatacaccggagatggaggctactatctcttctcttttgatgcagctaaacgagggaaagctttccatcaaatctaaaaatgaagccaaagtgattaaccgtaatatgaagcttacagtggatgagtctgcgtcggcgaatcctggggaggaacttaccgtcaatgtaaccattcctgaggcggtcagccatacgatttatgtggactacaggaccatggacggtctggcaaaagcagggacggattataaggaaaagaaaggggttttgcgtattcccgcaggggagactgccgcatccctaaagattcctactatgaataccattcaggatactaaggaagagacctggtggaacggagaaaaaagtttctatgtggaatttacaaacgtaactggtgcggcttttgcggacggcaagagttttcagtatacccgggccgggatcaagggaaatctgggggatgcagacagtgctgcctggaagacaacaacctataccacagagaatcccaattatgatccggatattcccatatcacccaaatatctggtctactatggattctatgtaccccagcaatatgcaaaaataattaattttctgaaaggaaagatggaaggcggaaataatgccggtcagatgtttctggatttgggaacattgagtgaggataagacatctttgaaggagacatggggaagcctcagtggttttcaatatggatcgtcggaagaagattttgtggcagatctggcagattcaggactgccggaatatttgaaaaacgggggatataaaaaggaagtaggggcacaggccactatgcggtacgtgtcgctggactccattacccccatatgtaagcctgtaaccgggacaaaggcaaccgtaagaccggcggaaaccgacaagacctattatgaggggtcaatgatcccctgcatcttacagacagagggaaatgtgcctctgggcgggccggttactattctggacgacggcagtctgcgtacagacgacggcagaagatttggtgacagcttttcttgcctgctcacagcagaacagtatgaaaaagtaacttctatgtgcaaggataagcaaacctctcagccgaactttgaccgggcggattacagttggtcccaggaacccggcttgggagcagaggagatgggcaaaggaacaatatcctttcaaggcttcgatactgccaataataaaatagatgcagcagcccctaagtatgtgcaggactatatcacaggaatttctgtggacaagcagtcttatgatccaggtgcggcaggggaacagaccgttaccgtaactgttacatacgacaataacacacccaatgacgactggctgtggaacgactatgccaatgacttcaataaagacggaaaggagtccattgatcgtctgaaagtaagcctggacggcggagctaccttatatcagcttaccccctcactggatgataaaaatgatccggtgaaggatggaaagcttacggctcagatcccccttccgtataatacagggggagaggagcggacttaccgggccgaactatttttgatgcccggggcggacgcaataacagatcctccaatcaccggtgtaaagaccgactattcctgcctgatgggggacaaccatcttgcagagttcaaggtaaagcccgtcacgcttatcaaagagggggaactggagctgggagaactccccgacggcaatgtgctgtatatggtccaggaagaagcaactcagcttacctgcaatgtgaccactgagaaccccacgtttcccggtgtagagtggaccagcagcaatgaagaagtggctcttattaaccgcaccaccggagtgattactccaaaggcagagggtgaggtacagtttacagcaactgcctacaatcggaaggccgcaccggcggtatctatagagactcctgtgatgactgtggtgaatgacggtccccctgccattgcagtgccaaaaggcatgaatattgtacatgccagaaagaacagtaaggctgccatttactggatgagcaatctgaacgggaaagaaaacaatcagatctatactgtagatttatatgagggggactatacggataaagctgctccgcttcccgaaaaagacaagattattaagagctatgaatttacagaaacggtaaccggagagattgaagagaatgttctcaccaaagtttctaaggatggacttcccacttacacgtttgtagtacatacaccgagtccggacaaccctgaaaaggtgctgacaggaagaggcggcatcatagtagctcccattcccgcatctgtgcgcctgactgcgcctgaaagtctctatgtggtagataaagagaccgaaagttttccggtgtcatggacccttgcggacacagaagaggactatgagttccagctctccgtaaagaaaaacggtgaggagatgaaaactgtaacggagggtacttccacctccttttccattgatgcagtgggaaaacaggatctgaaggatgtctacactgtgactgcgaaggtgcgcaacaaaggaaccgaaaatgatctttggtccacagattcctatatggtgcaggcttaccgggatggagcctttgcctttgacgtagaaggcgaaaaagtggaagacggcgggactgttactattaataacgaggatcggatcgctgttttgaagaagtatgacggagactggacagatgcggacagcgatgccattgtaaatatgaaccgtgagatctcattggataaaagtgtgaagattctggacggcaatatctggaatatggctgcagaccgctttgcatggtcctccggggacagttctgtgatgcctctgtaccggaaggacagcaacggttatacaaacgtggaaaagctggccagcccttaccaggcgccggatcgggaatttatgatgtccggaaagcaggacggaacagcgaccgttaaggctgtgcacagccgtaccggcagggagatccagctgacggctgagcttaccaccctgaaagataaactgtatctgttccaatttactcccatgcaggagaccacctttacctacgtaaggaaagacggcaaaaccgttacgcttcatacgaatgacaagggacaggcagcggtgtatgatccggatgggattcaaaatcctgtggaggcccgttccggttccgaaaagactacactgtatctgggaacaacgcaggcggatactctggtttcttctgagaaagataaagggcggaatgagctatatccggtcaactacatcaccctggatgaggcagcgcatgtaaaactgtatctgaaggatgaaaagggagatccctatacgggaaaaattacctataccggtggtctctataaaaatggcaaatattgtcctcttgtgcaaaacggcggtacagataaccgcctggaagcaactctggggaaagacggagagctggaactcttctacgatgtttccaagttctacagcgaggatgaggatcctcatacccagctgattgcaggggattatctgaagtttgtctacgacatccgtacatccggggatacctatcttccccagatacttaccgtggacagctattccaaggcgagacaagccagctttggcgacagcattattaatctgaaaaagaacacagatacttctaagaaagcctatatttctgcccaggcggtagcctatcctaaaaacgggtctataagcattctggacagaaaggatgccatcggctgctccacccagtatccgagtgtctctctggagacagagatgctttgctgggggcttgatacagcttctgacttccaatgctcgttgattgatgaggagcagaaaaagatggggcgtcaggaatataaagtagagaaatacccatttacggactttattgtggcatctaataccacacctattgatgagaatgcgggaattgcccagggcagttccaaacgtctcacggcccagctgtatcaggaaggaaaaatggtaagatcggttcccctttccttccaggtgactaatatgatcggcattgatgtaacccaggaaaaacagtttaagccgtttaccgtagatgtcaacctgaagcagggaactgcgggaaatgcgtcctctcagggcggagaagtagccagcaaaggactttcaaagttcaacacagggctggataccccattctttaaactgacggtgacgccaacggtagatccattcgtattccatgcatttgcagggtatgatatcgaccttctgggaatggatacggatatggtcatgaatcctgtggactgcgataccacaggggccaatgcctctgcctttgtggcagctattatgggggacggcagtaccttaaaagaccgtttccagaataagatgaacaaaactatgagcaagccgggagacactgactttggcggcagggcagctggctacatggcaggcgacattatttataacacagagacgcattcttttgaattcgtggtcacggacagcggttttaccctgggcggtaagcttggttaccactggacctttaattctgtagtgggatttgttccgattacagcagaattcgctctgggggcggccatagagctggattataaggccatgggagcttattcagaggaaactaacaaatttggatcagatattctaaccacactcagggtaaatgcttacctgcgggcatttgcaggatttggctttgatgtagccattgtggcacttaagataggtatgttcgggcagattaacatggaacactacagtcagttcctgagccggacctaccggaagacggataagcagcttcagggccacagaacagaactaaccggcatcataggaattgaatttatactgaaggtattctttatcaaatacaggaagacgctggcttccacgaaccttccctcactgactttctacaacggcagatgggatgagatccaaaattggatcgcgcagtccgggcttcctgactggggaggcaatattacgccgaaagcgatgatgctgtcagaagacggcgcattgacagaggtggcaaattccattagtttggaggacagaagctacctgaaccgggcagcccctttctccctggaagataaccacgcttctgcggatatccttcaggcaccgacgtatccctacggttatcctctggttaccagggacggtgaactcacggttgcgctgagtgaccagggctcttcggatctgaacgagaccagggtgtactggtcttccggttctgttgccccctctcaggagattcctgtggaatggaaagcagaagaagagaccgatacgtctgatcttgagatccttatgccgaattatcagggcagtgcagatgagtcaaatagcaaagatgccaagacaggcagtgccgtaaagacgccggactcgaatgtgtctctttcaggaaccggcagctttgcagtcgctgcatgggagaaattgagaggtcctgtcactatggaccaggagggagaatattccagcaaagaggcctccctggcagcctcccagatgatgaatgacacggaaatcgtagcttctgtctatgatggaagcaaatggacgtccactcgtctgaccaataataaaaatgcagatatggctcctcaggcggcagtcaacggcagcaatgctgtggtaatctaccggagtatggccagttccaatctggacgatcctctcagcaatgatgttatggacgaactgtggtacagccgctacagcgggggaacctggtccgaaccggcgcctttataccgggaaacgaacggaaccatcagtgcccttgaggcagtaatggacggggatggaaacaccggaatcaccttcactgtaaaacgggacgatatatcttcagaggaggaagtaagcgataccttcttcatggggctcaacgcggatgatacgattacggattccgtccgccttacactgggagagggaaccaatgaaaatgcgaagattacgactgccaggatcgacggcagaaaccagtttatcacggcatggtatcagaatcagtatgacgaggatctggactctgctataggcgatatctgttttaaagtgcttgacagcaacggagtggtgaaaaccgatttcccggacagtctgagcaggatgaatacaaacagcgacatggccatcggcagcaagttcgaatttgtaaagacaacaggggattctctgaaagatacaggacttgcctgggcagcttctgatatcacgccgagagaagattctctggaagaagtagaaaaagatctgctgtatgtatccatgtttaaggataccgagaacggtatcgttatgactccgggagctgttgcggcagatccgggagactatacctctgtggacagctttactgtgtggacaaaggacggcagaaccctggagagtatgcttttaggaacctactatgattcttccaatgcctctctggcaacggtttacgagggacagccggtgaatacggcggaagacacgtcccttctcatgaaaggaagcacctctctgggcaacagtattacggtggaccatgtgagctttgaaaatgaggccctgcggaagggaactctgctgcctctctccttctatgttgtaaacggcgggtgcgagacagtacagaaaataaaagtcacagcaggggacacagttctggcagaacagaaggtatctctcctgcccggcaatgatatgataatcaacggaagctatccggtgcctgcggaggaaggggctaatattgctgatctggaatataagctaacagccacctttgaaaacggaagcgaaagtacagaaggtacggtggttcttggcactccggatgcgggtattacggcaaatgacgtaaatatcctgaaggagcaggaggaacagagggaattccagctgcagttctacaatgacagcgccaatgccctggctaagacgggctataacgtaaaactgggattctataagagcagcggggctgatgtggcagctgatgtgaaactgctgtctgaagccaaagagacacaggaacccatgggaactggtgtgtatcagctgacaccggaacaagtggctctcatggacaaagacggattaagcatgaacttctcctatcagctgactgaggctgatacccttcctctgaacctatacgcaaaagtatggctggaggatgagaatggggatcaggtaatggacagaaacgtactcaacaatgacaaagtaatcaagttccaggatttggtggataaaaacaatggaaaccaattcctggtagaaaatgatgtcagtgtacagggagatactgcccaggcaactgtgacggtgaagaatctggccagaacaagagcagagaatctgaatattttgtccggcttatacgatgagtccgggaaacttctagagacgaagtatctggctgaggctcaggatgaacttctgaatctggacgaggaaggcgtgggaacgaaggtactcacctttgaacagccgggagcttttgtgcgttccactgtacttcatcagaattttgacaaggcagatgcctcccttcagagtctgacagcagatgaggtaacctttgaaactgcatttgacccggatagccaggagtacaagggaaaggcggaaaatcttaccaatacagtgatcacagcaataggcagccatccggaagccgcagtcaccatcaacggccagtctgctcagaacggcacactacaggtgcctctcacttttggggagaacattattacggtggaggttactccggcagaagaaggaatgagtccgagaacttataaactgatcatttataacgaagaggtaaaaagcacagggtatctgacactgcagcggacaggcgatcagccggagatccagtggtatggaacacccgtaagctacaaaataggactgccggaagggatagaagataaaggatttgtctcttaccggtttaccacagacagcggcaagacctggagtgaagaactttcctggaaagagggaaaagacaacctgattgagattacaggagagggagtctatgacaatcagatctccgtacggctgttcagagaagacggaagttatctggagagctcgccagtctctgtcaaattggatctgacaccgcctgtgattacagaggtaacctatgaaaaattagacgcagatggcagtgtaatacctgagggaacaaaggatgccaactggaacggggatctgagaatactggtacacaccagcgatacactctccggaatcaaaaaagtgatgggtgtgatggaagaggaaccgaagacagagtacacggcgcaaatgcaggaagaaggaatctactcctttactgtgtctccgtcctaccggggaaatatccttctgacgtcggaagatgaggcaggcaacacagttaagaactctgtgagggttaatgttgacaacaaagtgccggtaggcctgctctttgagacaaaagtaagcgagacagaacccacagccgatccggtaaccgtagaaatcaagaccattcatccggatatggctgcggacagcattgagtattccataggggatgaagaacattggaaggattataaagaacctctggtgattgaagagaatacggtaatcttctaccgggcaaaagatacctcaggcaatcagacagagacacagactttgaccatcgccaacattgataaaaaccggccgatcctgaaactgaccatatccggagatccggaaggctggaacgcaggagatgtaatggtgacagcagccaatgaaggaaagatactgggtgagccagagttctattaccgtgaaaaagacggaacaaaggatagcggccagtggaaacagatagaggctgacgaagagaagacatatcgggttgccttcacagaagagggagagaagacctgggaattcaaggcagtctcccctgcaggcatcgaaagtgaaatcaaggacgcagtgatccgcatcgaccgtaccttgccggaaggtgtactgaagatcggcactgagagctgggataaacttcaggctaagagcggtaaaaccatacagcggggcagcaatccatccatgagaatcacctccagggacgaactctcaggcatcagaagcgtagaatacgcagtaagctcccagagaattacagacgtatccaagatgggcgaagcagaaggctttacctggaaagcataccggtcttctgctgatgtaccgctgaacaaagacaaagtaaccatagtatacgccagaatcacagataaggcaggaaatgttacctatctctcctccgacgattacaaatatgtaaaatcaacaaatgtaatttcaaaaataaaagatgtactcactggcagcattgctaccggggatgcagcaccgattgcactctttgtcatactgctgctggcagcagcaggggggattattgtgctgattgtaagacgaaagagaaaggcgtaagtacttaaactgaattggggacgtgttccttctgcgaggaacacgtccccaattttatttttgttaaaattttaacttgacaaaaatggttagaatgatctaacctatacctgggaatactaaatgttatgttaaattgcaatgaggaggttgtatgtatgagaattttattttttgatacgaaaacttatgacagggaatcttttaataaacagctggaacattatccggggattaccattgattatttaaaggcggatctggctcccaagacggctcccctggctaagggatatgatgctgtctgcgcatttgtaagttctgatgtgggatccgagaccatggatgccctccatgaggcgggaatcagtcttgttttgatgcgctgtgccggatataacaatgtagatctggataaggcgagggaatatggcattcaggtgatgcgtgtgcccggatattctccggaagctgtggcggagcatgccatggcgctggcactcaccgccaaccgcaggattcataaggcgtatgtaaaggtgagggaaaatgacttcagcctgggcggtctgatgggcttcaacttctatcagaaaacggcgggaatcgtgggaactggtaagattggggcagctatggcaaagatttgccgcggattcggtatgaaggtcattgcttatgacgtgtatcagaatccagagctggattttgcagagtatgttactctggatgaattgctttccagaagcgatctgatttctcttcactgccctctcatggacagcacctatcatttgattaaccgtgagaccattgccaagatgaaggatggggtgattctggtcaatacctccagaggcggtctggtcaagacagcggatttgattgagggcatccgggcgcggaagttcttcggggtcggactggatgtatatgaggaagagaccaataatgtattcgaagatcgttctgacgagattctggagcattccacaacggcacggcttttgtcctttcctaatgttatgattacttcccaccagggattctttactcaggaagccctggcagctatttccggcacaactctggacaatgcggttgcatttgatgagggaagggaaaatggaaatgaagtaaaagggtaagtaagccctaagccagcagaacgccccgggtcagctcatggctgaattcccgatggaatttggagaccagtatgctttcatataaattggaagcaaaaacttctttttgaaataaccggtatgcctggggagtgagaagctcttttgcggcagcagggcgggaaatcacaggaatccgccctgctttttttatttcagcaagaagaggtgcagcctccctgcgaaatcccaggatacgggcgtaaggcgtctgctgagggatatcctccgggctgagctccaaaagaatgtgcagcagggccctgctgatcctggtgtaggtcagctcttttgttttaagaacctccgtaaaataggaaaagctgtcgcattgattctgccggttgattatacgtctggccagatcctcggacacatcctgaaagcgcaggagactttttttgctgcccccggaagattccagaagcagcttatagcgaagaagagaagaaaaatcgtcctctgtcaccggaccgtttgtcccaagggcattggaaaatatttcaaaggaggcaggcggcatatgacactccagtacagagagattttcaccggtctctattgctctgcggatagcgcttgcagagctaaaatttgctcccagttcccggtcatgatatccgcagtcttttcgctgtatggtcagggggcatatgggactgtccagggccgccaaagccttgcagtactccaccccaaggatattgttgggggaggagaggagcgccaggctttggcgtggctcttctccctgttcagtgaggaaggcttccagtgcttcctggcgggcggcaggaaaagatttcccggtttttaggctttcttttaacgccagggagtaagaggcgggttcctcccaaagcagtgcagccgttttctgaaacggcagaatctctccggattcactgccgaagcacagacaatccacgactcccaggctgtccaaaagtgttacggccccccgggcgaaatattcagcgcttccggtggcatagcagacaggaagctcaagcaccaggtctccgccgcatttcagggccattctagtgcgggtatatttgtcaagaacagcgggcacccctctctgcacataatctccgctcatgacaataatgacataatcagcccctgtgagacgacgggcttgttccatatgataggcatggccgttgtgaaatggattatattctgtgatcagagctactgttttcatagacgcgcaggtctcccctctaaaattatggtatcttttatttgactgcattatacgcagaaccgaaataaaaatcaagagaaataagaagtctgccgccttttagagtgtatgaaatcggaaatcccaggtaataatccatgtattgaattaaatacaattttgccgtctttaggggaatgaaaaccttgtgcctgtaaataaaaggttgtataattatgatatgtgaggctttccagggaattggtagcttccgaaatcaggaagaaaaggtgaaaaccagcagaagaaaggagtcaaaaaaatcatgggatttattgacgtaattaaagaaagagcaaaatcaaataagaaaacaattgtacttccggagaccgaagaccgccgaacatatgaggcaacagctcagattctaaaagaaggaattgccaacgtagttcttgtaggaagtgaagaagaagtaaaaaaaggaagcgaaggtttggatatcagcggggctgttatcgttgacccggcaacttctgataaaacagccggttacatagacaagctggtagaattaagacagaaaaaaggcatgacaccggagcaggctaaggaaatcctgttaaaccagtatttatactacggtgttatgatggtaaaaatgggcgacgcagacggaatggtatccggtgcctgccactcaacagcagataccttaagaccctgtctccagattctgaagacaaaacccggtactaaattagtatctgcattcttcttaatggcagtgcctgactgcgaatatggtgcaaacggtactttcgtatttgcagattccggtctgaaccagaacccgaatccggaagaactggcagctattgcagcatcttctgcagaatccttccagttattagttcaggaagaaccagttgttgctatgttatcccactccaccatgggcagtgcaaagcatgctgacgtagataaagtagtggaagctaccaagattgcaaaagaacagaatccggaactgaagttagacggcgaattccagctggatgctgccattgttccaagcgtgggacagtcaaaagctcccaacagcccggtagccggaaaagctaacgtgctgattttcccggatttggacgcaggtaacatcggatacaaattagtacagagacttgcaaaagcagaagcttacggacctgtgacacagggtatcgcaaaaccggtaaacgacttatccagaggatgctctgctgaggatatcgttggtgttgttgccattactgctgtacagtgccaggctgagtaaggaataataaatctacggaggaaattagaaaatgaatgtattagtaatcaactgcggaagctcttccctgaaattccagttaatcaattccgatacagaggcagtgcttgccaaaggcctctgcgaaagaatcggtatcgacggccgcctggtgtaccagccggcagacggtgaaaaagaagtgacagaagctgctatgcctacacacaaacaggccattcagatggtcctggacgctctgatgaatgagaagacaggtgtgatcaagagcctgacagaggtagatgctgtaggtcaccgtattgtacacgggggcgagaagtttgcttcctctgtggttatcgacggcgaggttttacaggcagtagaagagtgcaatgatctggctcctcttcacaatcctgcaaacttaatcggtatccgcgcatgccaggaacttatgccgaacacaccaatggtaggtgtatttgacacagccttccatcagacaatgcctgaaaaagcatatttgtacgggcttccccgcaaatattatgagcagtatggggtgagaagatatggattccacggaacctcccacagctttgtatccaagagagcagcagagttcctgggcaaaaaggcagaagatctgaagatcattgtctgccatttaggcaacggcgcttccgtatccgcagtagatcacggcaaatgcgtggacacttccatgggacttactcctctggaaggtctgattatgggtacacgttccggtgatctggatccggcgatccttgagtttatcagcaaaaaagaaaatctgacgctgtcagaggttatgaatgtattgaataaagaatccggtatgttaggcttatccggcggaatctccagtgactgccgcgacatccaggaagctgcagacgcaggcaataaagcggccatcagcaccctggaagcttactgctaccgtgttaaaaaatacatcggcgcatacgctgcagccatgaacggtgtggatgtaattgcattcacagcaggactgggagagaacgcagctgagatccgcaaaggtgtgtgcgaaggcctggaatacctgggcgtggaattcgacaaagaggcgaacaactgcagaggtgttgagagagttctcaccaaagaatcctccaaagttacggtagtatccattcctaccaacgaagaacttgccatctgcagggagacagttgggctggtaaaataagaatacgtatgttctgactaaaaaagacaagggagaatgcacaataccagtgtatctccctttctctatttcttcctctcaaaccggcgtttttgaaacctatttggctctgttacccggaacatatctagcggattttcttcataaatttcctcttaagacagatacaccagactgcggagagcagaagcgaaataagaagaaaccgaaagctgctgtctctcatccctctgcccatccagaaggagggaagaaaagaggccaggcaggcatatggccctctcacaaaataggggactgcaatccccagtgtcatcagtgatgacagctttgtcacagccatgccctccagcttattagaggacagagagacaatgagcataccaatgattagcccctgggcagaacccgcagctgacagcaaaagaagcattgccgggggtagtttggaaagctggaacaggggcaggagtatgcaggtaatgaaaaaggcaagggctgacggaattcccaggcgggcggtaaggtagccgcatttgcccagaggggtaataaagagatatccggcaatgcggtcatctgtctcctccagtaccaccatggcggccacaaagcagtacatagtgggagagagaacagaaaagaaaagatcaaaaatgccgtaataaaaggtgggaataaaggacagagccggaattcccagccgaaaaaacagtccgcacagaataggggcaaagcaggcggcaaacagcatcatatctccccggatggccagcagcatctgcagaaaccctgtttttattgctctcataatttgacacctcccagagtctgaaacattttcagcgtacttttcattcccacccaaaacaaaaggatgatgatcagaagtaataataatatgccggggatgacagcgctggtatttcccatcagcagctgtattcccacagagacaggataatagcggagtacatccggaccaattccgaagaaataaagcagagccggcacaaaacacaccatctctatgggtacggtgtacagcaaaaactgattcaggctggagatatgtgcagcggcaatgatccccaaaagtgtaaaaactgcagacagcagtccggtgccggcggcaataagaggaatgtgctccatccccatactcagagcaagaatcagggccacaatgaccgagagtactcccagggaaattattttggaaattatgtattcccggacggttaccggtgatactgccagggcatttactacacgctggcttttttccagaagaataacggctcccataaagaacagccccatagcagccggatcggagaaaatcagtataaccgcagttccggtacgccaggccgggggcagagcgcccagcagtacaaggtacagcacggtcagtatggcgtaaatcatatagataccgtatttgatctggaaacaaatgtcccagaaaatcagatgcagcagtctcataccagtgtcctccctgtgatatccatgaaaatgtcattgagtgtaggctcgctgctgtgtatggacagaagccggttctcttttatgagggaaagaagaagagcatccccggagacttgctgcagggggcaggtaatggtgcgctctcccttatcataataggtataggtgattctggctgcgcctctggacatgatcagattgtgggggctgtccagagcacagagccttccatttacgataaaggctactcggtcacagagttccgcagcatcctgcatattatgtgtagtcagaactaccgttttgcctctttctttttctccaagaatcaggtctttcatcaggcggctgttcgtggggtccagtccgctggtgggctcatccagaaacagtacctccggatcgtggagcagggatttgataaacgtaagccgggatttcatacctttggagaattcggatacccgtttgtctccgtcccgctccagacctacagtttccagcagctcgtcggcagagcggggctgctttcggtagagagaggcaaaaaattgcagattctgtctggcagtcagcttttcatataaagtcggaaattcaaaatccacaccgatggtttcgtaaaaccggcctgtatggcggcggcattccatcccgccgatggatgcggaacccttatagctggtaatcataccgatcagtattttctgaagtgttgttttccccgcccctgagggacccaggaagccaaagatttctccctgtttaaccgaaaaagtcatatctgtgataaagggagttctggtgtagctgaaagacagctgttttacttctatcatttgaaaaatacctccatactatctgactaaaataatatatatagtcaaaataaaattaatgttatgtccggcaaatcaagactgccggacgggttactgtaacagctggatagccagaccccgaagcagaagcttcagagcttcgtcataatgtttgtcctccaattcctccttgtggagagtggcaaagaaaagttcacggaatgccgcgctgtatacggctgtatccttgtcagagtccacagccagagctgagaatagtctctctacaatggaatggtcctgattcaggtgttcttccaggacatccctggggagtctgcgagccagaagctccacttcgtcggaatgaatcatttttaggataggcatcttctccgctgtcttaaaaaattggaagaatacatctgcaagtgcctcgggagtaagtctttcccggttcagaccggagactgtatccagaagctgtgtctctaacttgtggtgcagttccagaattacctgaaaaaataagagttctttggatgggaagaagagataaaaggttcctttagggatcttaacccttcccacaagctcatctacagtagtgcggcgaatcccatattggtccagacatttggcggcctcctcctttagacggcggacaatgtaagccttttcttcatcggagtaacgttttggcataatagcctcctttttgactaaaaaagtttgtacagtcattataagcctgggatcattcgttgtcaaccggctgtgttatccggttcaaaaattgttctattctggaaaaaatagttgacaaatggccatgccccaggtataatcaataaggtgtgattaggagactgttatgctaattaatttatcagatattttatccaaagagggagaaacacaacgtgtggaagccatggtggacatggaaaacttcacctccaggctgggaactttccctgtacaaaagaaaacaccggtacattttaccattcagaacaaaggaaaaaaagtactgcagattaacggagaaggaagtgtgactctgttgatcccctgcggacgctgtctttcggacgtgcctgaggagattgtgtttgcctttgaacgggaagtagacatgaagcagtcagaagaagaacggataaaagatttggatgaaagcaattatatcacaggaggcaacctggatgtagagcagttagtttataatgagattttaatcaattggcccttacgggtactgtgtaaagatgactgcaaaggaatctgtagccattgtggaaagaatttgaaccagggtccctgtgactgcaaggtcgagaacctggatcccaggatggcggtaatcagtgatatattcagcaagtttaaggaggtgtaaacaatgtccatctgtccaaagaataaaacttctaaagctagaagagataaaagaagagcaaactggaaaatgagcgctccgaatttagtaaaatgcagcaaatgcggagaattaatgatgcctcacagagtatgcaaggcatgcggctcttacaacaaaaaagaaatcatttccatggattaatcctgggaatgtaaaagaagaccgggaaaaggccaatggctttttcccggtcttctttttggcagaacatgttataccatgctaaaataatggattactacaattcattatgttatactttagtgtaagggtgccgtatatccccttgaagggcatataatcctgaaatggagtccggcattttaaattaaaagagaggctgcagatgaaaaggaaaaagatagcaggtttatgttctgcactattcatgttttccctgatgcttccgggatgcggaagtaaaaatcaggtggtaaactattgggacgcaaatgaagaggttacatccattacatttttcgggaataaatatgaaccggagaatgttacggtgattgaagagattatatcggactttatgagtgaaaatcctgaaataagggtttcctatgagagtctgaaggggacagaatattatgaggctctggagaaaaggctgtctgccggaaagggcgacgatgtctttatggtgaatcatgatattgtgcttaggctgggggaagagggacagttggcggatctctcggggattgcctctacaaatgagtatacggatcagatgctcagtcagatggagcgtgagggaaagattttctgggttcccactacagtgtcggcgtttggcctttactgtaatctggatctgctggaagagcataagcaaaagatcccggaaaatctttcccaatgggaagaggtttgcgggtattttaagggacagggaatcacacccattatcgccaataatgatatctccttaaaaacattagcaataggcgccgggttttattctgtgtatcaggagggacggcagtcagaggtgttttcccggctgaaccggggcgaagatagattaagtgagtacctgacccccgggttttcactggcggatcgctttgtccgcaaggggtatattgacggggagaaggcagcgcatacaaagaaaacctctgatgatctggaagagtttgcaaaggggggctctccgtttatgctgacgggggcctgggctgccggacgggtcagagatatggaaccagggtttgaatttcaggtggttcccctcccggctctggaggacggtgcgcttatggtaatcaacgcagatacacgtctgagcgtaaatgcaaacagcaagaatgaggcagcggccaaacagtttgtggagtattttacacagagagagaatattcagcaatttgcagatcagcaatcttccttcagtcccctgaaagagggaagcccttcctccagggaagaaattcagcctctgattgcctgttaccagtcaggcaggactgtgattggggcagacggaatgctgaatctgcccatttgggatctgacggcccaggcatcggagaagctgcttgcgggtgaagcgctggaatcagttatggactggatggatcaaagggctgaggaagaaaggagtgtgccgtgatcagggaagaaagcagaagttcaaagaagaaaattgctctggccgctgtcctcattggagctgttcttatgctcttgaccttttcttttattcagtatgtcaaaaagcagctctgggaacaatcggtcagtgctatcgtggagagcaccagtcagggctgcaatgcgctgcaaatgcagctgcagcacgactttgcgtctatgaaagctgccgctgaaaaaataagtgaattttcaggggaacagatggagcaggcggccgggctgatggaacagtacagccgcatggagagcaatatcagtctctacctgagagatggaagctgctatccggagggcctgcagaaggacagccgggcagaggctgatctgtgggagggggagagccaggaaggtattctgaatccccatatcagcagcgcaacaggaatgaatgtatttgatctatacgtaaaagtaaccatgactgacggcacagagggctgtcttgtgaaagagtatgaggtagtcagcatagcagaaagcttcagtctgtctttctacaaggactcgggattctcctatatcatcaatacacagggggatgttctcatccgctctccccatccgaacagtaataaaacggttaaaaacctgtttgatatgctgccggaatcccagaatcagccggagagtcttgaggcatttgccaactctcttcaagagttccacacgggctgggcagtgttccgctatcagggggaagatactgttttctgctacacaccgctgaagctggagtcggactggtatctgatttccattattccggaaaaagtggtgagtgagcagagccgggatattctaacccgctctatggttcttatcgccagcattattctgggaattatttttctggtactattttacatccggtctgccgccaagacgaaaagaaaactggatcaccaggcggagtatattgtacatctgtacaatgttattcctgagggcattgcgctgattacaacagacccgcctcaccgttttcttcagattaatgaagaaggcctgcgtctgctgcaataccaggagggctctcaagatgatgtgccggaggacgtttccctcagagatatgattcatccggaagattacggggaggctgcacagctttttcgggaaacctccgaagccagtgggaaacatgtatttacagccagattaaaaagagcggagggcagttatttttgggccggaggcattgtggaaaagacacaggacgaaaacggggaacctgtcctgattgcggcttttcatgatatcacggatgaaaaaacggcggaagaggccaaagagaaggaacagcttcaggagcgcatcacgctggtgggagcgcttgccaatgcctatccggttattatccaggtgaatctcaccaatgaaaagctgggcttcatatatgtccagcccggtcttatgctggatcttggcagacaaaaatcatacagtgagctctatgaagatatggctgctaccatccatccggatcacgtgagtaagttccggcttcactttgcccctgaaaatctttatggtactcttgggcacacgaaaaacgaagtttttatagaggcaaagcaaatgcttgcagacggccggtatcactggatctctacgcagattatttatgtggataatccttattccggggatgagctggcgatcctcatatccaggaggagcgatgaacagcgttacgaggaggaacagcggcgccaggcgcttcagagcgctttggacaatgcaaatgccgcgaacagggggaaaagccagtttctgtctaatatgagccatgatatccgaacgccgattaacgccatagtaggcatgacctccattgccgccgctcatctggacgataccaggcgggtggatgaatgcctgaaaaagattgcactttccagccgacaccttctcggactgatcaacgatgtcctggatatgtcaaaaattgagagcggaaagctgacgcttcgggaggagccttttaattttgctgaattaattacagagaccgtagaattaatccggacgcaggcatatggaaagcagttacagaccgatgtctgtctggcagccctgaaaaacgagaatgtaacaggggatcctctgcgtctccagcaggtgtgcctgaatattctgagcaacgcagttaagtatacgccctcagggggaaggattcgcatcgaggtcagccaggaggacagtacagggtttggctatcaatgctatgtgtttcgctgtgcggatacaggaatcggcatgaaggaagagtttttaaagatgatttttcagccgtttgagcgtgcccaggattccacaagcagcaagattgcagggaccggactgggtatggcaatcaccaagaaccttgtggatctgatgaatggagagattcaggttgaaagcaagaccggcataggttctgtatttaccgtgaggattcctctgaaggtgcaggatgccccggaggaaaaagtcccctatcattggaggggggtccgtaccctgattgtagatgggaatgtccaatcccgggaaaatactgtccggcttctggcggatatgggacttcccgcagaggctgtgggaagcggagaagaggcagtctcctatattatggaggcccgggattccggaaatccatgcggtctggtatttattaattgttctcccggggaaggcgggggcgcagaagctgtccggcttatccgggaacactgtggtgccaagagtcctgcgctggtacttaccgcaggagaatgggcggagatagaatatgagggaaaagagacagatgccgctgcgtttttatccctgcccttctaccggtctaaggtttaccatctcctgaaagaactggacagcggcagcagactgccccagcagtcagaagagacagccccggactattcccggaagcgtctgctgctggtggaggacaacgaactcaacagagagattgctgtggagcttattggcagtacaggcgtgcagatagaagaagcctgtgacggagaggaagcggtaaaaaaggtggaggtctcagaggaaggctattatgacatgatcatcatggatataaaaatgcccattatggacggttacgaggctaccagagtgatacgaagcatgaaccgccgggatgtgaaaactatccctattgtggctatgacagccaatgcctttgaggaggatgtgcggacagcactccgtatggggatgaatgcccatgtctcaaagcctattgacacagggatgctgaatcagctgctggctcagtatttatcggattccggggcttaggcatgcgtttgtatctcagcgaatgtgtggatatttttccctcttgcagtatggggggagattccgtataataaagctgagaaaagaacaaatgttcgaaaatgggaaggagatgacttgcaatgtccaagaattttaatatggatgctatgaccctccaccaggtcaggaatcccaaagctcatatgtaccgctctatctgtgtgattgctacctttaacaagctgggaagagtggagccggtagcacttcggttcgagacagaggaagagaaatttgatgtccgcattgaccgtgtgctttcctgtcagtctgagtggacggatgccattgtgtttcagtgcctggtgaccgtgggggacaggcagcagcaggtgaagctgctctatgagatcagcgagcatatctggcgtttgctgtaagactgcttacctctttttttcctgtacagttgacaaattgttcgagaatgagtacacttgtggagaaataaatttatcacgggagattctcccctcactatgagaaaaggaggaattataatgtaccaattaaaaaaggggttactgggcattctctttggatgctgtgtactgtctctgacagcctgtagtccgcagaaatatattgacaaaatactgggcacagagaaggcagacgaggaggaatccgttcaggaagaagtcattcaggaagaaccggaggtccctgtggcaaaacctgaattcacagccaatttaagcggaagcatgacctacggcctgcaccagggagcaacgcccctgaaggtggaagcctctgtgagcgactcgggaacgctgacctaccagtggtaccggaatatgacgaataccaacgggggcggaaccataatcgagggtgccacggacgatacgtataccccgccaacggatcagccggggatctactattattatgtagtagccaccaacacggttcagaattctacggaggggactaccagtgagactgcggaagtcattgtaaatgatgaagagggcaatgtagtgaacgcggaatccggtcagtggaagcaggatgacaaaggctggtggtttgaaaatgctgacggaagctttataaagagccagtggaaagagattcagggcaaatggtacgtatttgatgagaacggctatatcagaacgggctggttccaggacggcgacagctggtattatctgaacgaagacggctctatggcagcagataaagacgtggaaggctatcatctgggcagtgacggaaagatggaataaagaaaaataacggaaatgttgcattttctttcgatgtttagtaatattgtgggtaggtattattaggaggaaacacatggacgagttagtaaaagtggcagtggatgccatgggcggagacaatgccccggcggaggctgtaaaaggtgccatagaagcagtgaatgaaaaagaaaatctgcaggtactcctggtaggacaggcaccgctgattgagaaagagctggcgggctgtacctaccccaaggaaagagtaactatcataccggctgcagaggtaattgagaccggagaacctccggtaacagccatcagaggaaagaaagattcttccattgtagtggggatgaagatggtcaagaaccaggaagctgacgcctttgtgtccgcgggaagtacaggagctgtgctggttggcgggcaggttttggtaggaagaatcaaaggtgtggaacgcccccctttggcaccgctgattcccaccagggacggtgtctcgcttctgatcgactgcggggctaatgtggacgcgcggccctcccatctggtgcagtttgcccgcatgggatccgtctatatggaacacgtcgtaggaatcaggaacccccgtgtggcgattgtcaatatcggtgcggaggaggagaagggcaacgctctggtgaaggaaacctttcctctgctgaaagagtgcagcgatattaactttgtgggaaatattgaggccagggacattccaaacggagatgccgacgtcattgtctgtgaggcatttgtgggaaatgttatactgaaattgtacgaaggtgtgggcaataccctcatatccaagataaaaggagcgatggtatccagcttccggggcaaactgggggcacttctggtgaagccctcactgaaaaaggtgctgaaaagctttgatgccagccagtacggcggtgcgccgcttctgggactgaaaggactggtggtaaagtgccacggaagttccaaggcgtcagaattcaagaattctattatccaatgtattcaatttaaaaaccaggatatcaacggcaaaatcaaagaccatatttctggtaatgtagaagaaaattaagggaggattacatgacatggaattggaaaagttacaaaagattattgcagaggtattaaatgttgatacggaggagattacaccggacactacatttgtagatgatttaggggcagattcccttgacattttccagatcattatggggattgaagaggaattcgatattgagatcccaacggaggaagctgaacagattgtctcagtgggcgatgccgttgagcagattaaaaaagcaatcggataatgcttagagaaacagggctgttgcactatcttggtgcagcagcttttctgataaaggatatctgaagaacagaaaaaggagagaactatgggacgttacgacggactgctggagctggagcgtatcatcggatacacttttcaggacatggagcttctgaaccaggcgctgatacacagctcctttaccaatgaacacagaatggataagctttataacaatgaacgtctggaatttttaggcgacgcggtgctggaggtggttaccagcgaatttttatatctgaattacccgaaccagccggagggagaactgacaaaaaagcgcgcaagtctggtatgtgagcctacccttgcattctgcggccgggagctgtctctgggcaggtacctgagattgggaaagggtgaggatgccacaggtggaagaacgcgggactccattatctcagacgctgtggaggctgtcattggagctatctatttggatggtggttttgctaatgcaaaagagtttattctggcccacgtgctcaatgacgtggagcacaaacagctcttttatgatagcaagactaccctgcaggaaattgtccagggggaatacacatcagaagtagtatatgtactgacaaaggaagaaggcccggatcacaataagacctttaccgtggaggcgcagctggaaggaaaagtcatcgggcacggacagggaaggacgaaaaaggccgcagaacaacaggctgcctataatgccatccgcttactaaaaaaataggcaggtgaagtatgtatcttaaaagtattgacgtgcagggattcaagtcctttgccaacaaaataacctttgaattccacaacggaatcaccggtatcgtgggtccaaacggcagcggaaaaagcaatgtggccgatgcggtgcgctgggttctgggggagcagagcgccaagcagcttcgcggggggaacatgcaggatgttatcttttccggaacagagaccaggaaacccctgggtttcgcctatgtggccattaccctggacaactctgaccaccagcttcccattgattatgaggaggtaacggtggccaggcgtctgtaccgttccggtgagagcgaatatcttttaaacgggacctcctgcaggctgaaggatgtgaatgaacttttttacgataccggtatcggaaaggaaggatattccatcattggccagggacagattgacaagatcttaagcggaaagccggaggagagaagagaactctttgatgaagccgcgggaatcgtcaagttcaagagacgtaaggccactgccctgaaaaaactggaggaggagcagcagaacctgacccgtgtcaatgatattttatctgagctgtccaggcagctgggacccctggaacggcagtcagagactgcgaagatttatctgaagaaaaaggatgaattaaagcagctggatatcaatatgtttctgctggagatggagcacagcaagagccagctgcaggagatagagcagaaatataggatagccagagatgacctttcggagacgcaggaggcgttcgctatcacaaaaactgagtacgagaaggcagaagctgagctggagcagctggatctcagaattgagaaggccagggaagaggccggccagaaagctcttatgaagcagcagctggaaggagagattaatgttctccgggagcagattaatacggcccggatgaatgacgagcatttccagaaccgcgccctggagattaaaagtgagattgaaaagaaaaaagaggatatcacagagcttgaagggcagaaggcagatcttaaacgggagatagcagcggtaagcgccggacagacagagaagcagaagtcgtacgacagcctggccggtgatatcacagagcttctggagaagatggaggaggcaaaaagtgaaatcattgagctgctgaatcagaaatcttctataaaggggaaactgcagcgatttgaggccatgcgggaacagatttccattcgcaaggcagagctgaacaagcagatcctgattttaaagagccaggaaaacgagcaggaacagattcagaaggaacaggaagaagaacttgcccggctgggaaaagagattcagaagtatacaggggagagccaaaatacggaagcagagattcagaagctccagactctgatagccaaaggcggcagggagatggagatcgggcagactgcctatcacagagaggcttccaggctggaatccttaaaaaacctcacggagcggtatgacggctacggcaatagtatccgcagggtgatggagcagaaaaagaatcagccggggatcaaaggtgtggtggcggatctcattaaggtagacaagagatatgaaactgccatagaaactgctctgggaggaagcattcagaatattgtagcggataatgaaaatacggccaagacaatgatttccttcctgaaaaagaaccggtacggaagggcgacctttcttcctctgaccagtatggcccagaataaaaaggctatggtgaaccaggaggcccgaaaggagccgggtgtgatcggcgtggccagtgagcttgtgcaggcagagccggaataccaggggatgattcatcatctgctggggcggacactggtggttgaccatatggatcacggaatcgccatttccaaaaagtatcattactccatccggatggtaaccgtggaaggagatctcctgagtccgggcggttccctcaccggaggcgcgtttaagaacagcagcaatcttctggggagaagaagagagattgaagaactggagtccagtgtgaaggctttaaaagccgatatggatcagatgcagaaaacgctggagggttacagaaacagcagaaatgccctccgggagcatctgggcagcctgggagagaagcttcaggagctgtatctggcagagaatactgcccggatgaatatgacctccgcagaggaacggtacgcggggatccgggaacgatataccagactgggccaggaggccaaagagattgagacgcagatgtctgagattgcggacagcagcggttccattcagggagagatagatgcatttgacctgagagaggcagaacagaaccggatcattgaggaaacgcagaagcttctggaggaaaagcgggaggcagaagcccttctttccagggagctggaggagattcacctggaagctgccaatctgtcctcaaaaaagggattcctggtgcagaacttgaaccgtatcacagaggaaatagacaatctggagcagcagctggcggatatggatgtaaatctggaggagggagccaaggatattgccaaaaaggagagggatatctctgagattcagaaaaccatagaggctgctcggcagacggaagaggacgatgagaggcagatgaaggaatacctggccaaaaaggaagagataaatctttcccacaagtctttctttcagaagcgggatgagctctcaggacgcatgaatcttctggacaaagagtgcttccgactgaacggccagaaagaaaagctggaagagttccaggaaaatcaaatcaactacatgtgggaagagtatgaaattacactggggcaggccctggaaaaccggcccgaagaactgggagagcggggggcaatcaagaagagcatcgccggaatcaaggatgagatccgcaagctgggagatgtgaatgtgaacgcaattgaagactataaaaatcttctggagcgccataccttccttgctgcccagcatgaggacctggttaaggcagaagaaacgctcctgggaattattgaggagctggacagcgggatgcggaaacaatttaccgagaaattcgcccagatccaggtggaattcgacaaagcattcaaggaacttttcgggggcggcaagggaactctggaactgatggaagaggaggagggggatgttctggaagcagggatacggattatctcgcagccgcctggaaagaagcttcagaatatgatgcagctttccggaggggaaaaggctctcaccgccattgcactgctttttgccatccagaatctaaagccatctcccttctgtcttctggacgagatcgaggctgctctggatgactccaacgtaacgagatatgcacaatatttacataagttgacaaagaatacacaatttattattataacacatagaagaggtaccatgacggctgcggaccgtctctatggtatcaccatgcaggagaaaggaatctccacgctggtgtctgtcaacttaatagaaaatgatttagacaagtaggaggagaaagaatgtcagaggaaaaggaaaagcgcggcttttttcgcagactggtggaaggcttatccaagaccagagacaatattgtatccggcatagactccattttcagtggtttttccagcattgatgatgatttctatgaggagatcgaagagatactggttatgggcgatattggaattaataccacgaatgcgattatacagaacctgaaggaacaggtggcagagaaaaagatcaaggagccctcagagtgcaaacagctcctgatagacagcattaaagcgcagatggatgtgggggagactgcctacgaattcgaaaaccagaagtctgtcgtactggtgatcggcgtcaacggggtggggaaaaccacttctgtgggaaagttggccgggaagctgaaggatcagggaaaaaaagtaatcctggcagccgcagataccttccgtgcggcggctacggagcagctgagccagtgggcgaaccgtgcgggggttgagattatcaccggccagaacggggcggacccggcagctgttgtctatgatgcaattgcggctgcaaaggcaagaaatgcagatgttcttctgtgtgatacggcaggaagactccataacaagaaaaaccttatggctgagctgaaaaagatttaccgtatcatcgaaagagagtatgcggacgcccatctggagacgctggttgtgttagacggaaccacagggcagaacgccctggtgcaggccagacagtttaaggaagtggcggatattacaggaattattcttactaagctggacggcaccgcaaagggcggaattgctgtggcaattcaggctgagcttgatatcccggtgaagtatataggtgtgggagagagcatcgacgatctgcagaaatttaatgcagatgaatttgtaaatgcattatttgatattaaacaggaagaaggataaggatatgttaacattagacaggttcgaagaagcatcggaagttgtaaaacaggtaacccaggagacaaaattagtctacagcgattacttcagcagacagacaggaaacaaggtatacctgaagccggagaatatgcagcttacaggggcctacaagctcaggggagcctattacaaaatcagcaccctgtctgaggaggagagagaaaagggattgatcaccgcgtccgcggggaatcacgcccagggggtagcttatgccgccaaggcctttggcgccaaggcagtcattgttatgcccaccaccacgcctctcattaaagtggagcgcaccaaaagctacggggccgaggttgtgctttccggagatgtgtatgatgaggcctgtgccaaagcgtatgagctggcagaggaacatgggtatacctttattcatccctttgacgatccggcggttgccaccggacagggaaccattgccatggaaattgtaaaggagcttccgctggtagactatatactggtgcccatcgggggagggggcctggctaccggagtgtccactctggcaaagcttctgaatccaaatataaaggtgatcggcgtggagcctgcaggagctaactgtatgcaggcatctctggaaaaaggggaagtggtaactcttcccaatgtgaataccatcgcagacggcaccgcggtaaaaaccccgggagaggtgattttcccctatatccagcagaatctggacgatatcattaccgtagaggacgatgagctcatcgttgccttcctggacatggtggaaaaccacaaaatgatcgttgaaaattcaggcctgctgaccgtagcagctttaaagcatcttcctgtgaaaaagaaaaagatagtatctatcttaagcgggggcaatatggatgtgattactatgtcatctgtggtacagcacggattgatccaaagagaccgtatctttaccgtatccgttcttcttccggataagccaggggaactggtccgggtggcaagtgtcattgccggggagcggggaaatgtcatcaagctggatcataaccagtttgtaagcactaacagaagtgcggcagtggagctgaagattaccctggaagcatttggaacggagcataaaaagcagattgtaaccgctctggaaaaggaaggctaccggccgaagcttatccgggcgaatctgtagcatgtgatttatgggatgggaatgaaaaggagaaggcaaagcaactaacggctgctttgccttctctttttctatttaaaaccctatgcgcatctttttttgggcctgttaagcaggaaaacggccctctcttgcagtctccagagcagctaccctctgttccaggttgtccagaagatcggtatgtctgttggttgtgattttgtaaagcaccacatcattttctgtctccagaatttggtaaagttttttgttcagctctatgtgattctcggctataatggaaatattgcggtttgtcacggtctccagtgtagagctgacggcccgctgcctggtatccagtgtttctatgtcctgtttgatagaacgaatatccttctgcacagtttcaagtgaatgctccatggaatctaagcgcttttcaaaagaatccatgcgcttttcaaaagaatccatgcgcttttcaaaggaatccatgcgtcgttctaaggacttcatgatctgcagcatttcctgtaagatagtttgatcttccatttatcttctcctttctgaatttccccctacgtaaagagtaacacagaagaacgtcaaagtaaatcggacaaagtaccaaaaagaatagtcggcctagtcactctattctgactttacatcccgaattctcatccaaaggattccaaggaagcagaagagtgcagagaatcccagacatgcggcaatgagcacaggaacgggatagggcaggtcaccctttggattgttggcattcatccccagggccatgagagagaagggggataaaaggccaaatccttgcagatacaggcccattcctgcaagccccccggcaaaagcaatggccaccggaaccgcaaagcttctgaaaatcagagcacagagcagctggaaggcggcgattgccattccggacagaatccccagaagtgtccacagaaaaatctctctccagggaaacggcgctgtgaggcccaggaagatccctgccagaaaatagagcagcaccagaaacagctgtgtaataaaaatcaggcctcctgcagtgagccatttccccagaaaaagggaggagcttctcaccggaagcgtcataagcagattccagttgtggttcagatgctccagacggaagaggtaggagcagtagagcccaataagagccggaaagaaaaagtagcagtaaaacaaggtgacctgggtccagagactgtaccactgactggtaagaataccggtgttcccggcataattggcactccccagaaatgcggggatcagcgggataccaagaactgccagccagatacaggaatgtttcaatttgcagcgttcggttttcaagatacggttcatgtcagacctccttttttcttagcagaatccgccctgctggataaagaatcacaaggagaatcactgccgggatccagtccgcccaggggatagggataaaagtatagtgagcagttaccgcctccaaatcataagagacagccacagaggaaaggcgggaataatagccccagggaatcaaaagtcccagactcttcggaaaaaggttgcttaaaaacccaataaatgccccgaggagtcctgcggtcaggggaattaactggttggcatacaccatggagagaatctggtaaatgagataaatgaccagattcaccccggaacaaacccaaaaggcgtaagccagctgcccccctggcacaggcccgtaaaagccctggagttttcctgcggctgcaatcaccagagtctggagaaacccgcagaggaacatccagagatagccgtacagaagcttgccgtgaaagattccggaagagggggttagggtttttaacagtttcagtgtctggcctttatgctccatgtcccagaccctggaagcagttacagaggccagaacaggcatggtcagacagttcagcatctgcgtgccgatgataacaaaggcccagccgtctctcagatcttccccgtccatccggcctgtggtccacaagatccataaaagctggaatcccagaataagaagcggcatcacccagatcttcctgtggcggcatttgcgggcctccagtgcgaatgcgttcatcagaggctcaccgcctttccggttaattccaggaagatatcttccagacttttgcagtcttcttcaatgcgggcgatccccacatgttccgcggttaaaagctgcacataggaagctacttcctcgtcttctgcataaggaagggcgatcctgtcttctgtttcctgaaaggcaatcccgttggtccgcaggatattggcggcgcggctgttgtccagtgtgcccagaagaagacggcggctgctcctggcgtgaagactttccagactgttttgaaaaacgagttctcccttatgaatgatgcctactgtactggccagctggtcaatctccgtgagcagatggctggatactactaccgtcatctgctcacgggagggaagggagagaatgagctcccgcatttcctggatgcccgcggggtccaggccattggtgggctcatccagaatcagaagccggggatgggacagaagggcacaggccagccccaggcgctgcttcatgcccagggagtactggctcacctttttgtccttttgctgggtcaggcgtaccgtcttcagcacttccttcacattagcatccggcaactgacggatggtctggatcagacgcagattctcttcccctgtgaggtgtccgtagtaactgggggattcgataagacttcccacattttttagtatggacagacggctgcgggaattgacttcttttccgaagactgtgatggtgccccgggtgggtgcggcaagtcccagaatcagcttcagggtggtggatttgcctgcaccgttggggcccagaaagccgtagatggacccctccggcactgccagatccagatcctttacagtcataaccgttccgtacttcttgcacagtccgttggttttaatcatatatggcatattgcttgctcctttcttttctctctgtctcaaaggataccagattccgcttacaggaaactaaaggctgccttacatttaccttacattttgccggggaggcagttttttctgcttttctggggtataatgaaggaaaaatactgtaaatgctgagaggtgacataagtatatggaatcaatttacgagtgcaaaattttgatcgtggatgatgagcgggggattctggagatgacagagaagatactccggcaggaaggatattataaaatatataaagccggctgctgtcgggaggccagggaggcattctggcaggtaaaaccggaagggatcattctggacgtaatgctgccggatggagatgggtttcaggtgatgcgtgattttcgcatggagtcccaggcgccggtgctttttttgtcggccagggacgaggatgagaatcggttgctggggttaggactgggagcagatgattatattactaaaccgtttttgcccagggagcttttgctgagactgggggctgtcctgaaaagggtttattttccagcggtggaacgggatggaaagcttccggtattcccggtgggggaacgcagcgtggatttgaacaaaggcactgtggattttggggatgtcagcctgactttgactgccaaggagtacgcgctgcttaagaagctttatgagaataaaggaaatattgttaccatagacagcctctgtcaggcggtctggggagaggacagctatgggtatgagaatacactgatggtgcatatgagaaggctgcgggaaaaaatagaggagaatccctctgcgcctgcacatcttctcacggtacggggactggggtataaactggtatgaaaagttttttaaagattcagatgcgctacggactaatggcagccgggattgccttgctgctggtagtgttaaatatcaccttttttctggggtatatgctgcggtacggagagcgtgggattacacacacctattttagaatggcagagattacggacagccttgtaaaggaagccgatgggtatcacatgccgggggaatctatggcaactgttgaaaaagagtttgtctgggcaatgctgctggatggggagggaaatgtagtctggagctgggaactgccagaaaagctgaagaaaaagtattccattcaggacgtagcggcatttgccaaatggtatctggaggactatccggtaaaaacatatgttcatccggacgggattgctgtctatggggaggcgaagggcagcacctggaagaccaggcttgagcttccggaacaggtaatcgcctatttcccacagggggtttgggggctgtttctggtaaatctcattctggctctggggctggccgcattgctgggataccgtttgttccggtccctgcgtcctctggcggagggaattgaacagatggaggaaaaagaacccacagatctggaggagacaggaccgttaaaggagctggcagccagaatcaacagaacctcccgggagcttgccagccagcatgctgtactgcagaaaaaagacacggccagaaccacatggattgcaggagtatcccatgatatccgcactcccctgtctctggtcctgggatatgccagccagctggaggaaagtccgcatctgacagaagaggaacaccggcaggctgaggtcatccgtatgcagagcctgaagatcaggcagctggtcagcgatctgaacctagcatcaaagttggagtacgaaatgcagcctctgtcagtggaagacatacgtatggcaggacttttgaggaaaatagccacagaatttatgaatcagagcaagggcggggacctggagattcttgtgcagatccccgaggaagcccggaatctaaaggtgcagggagacagaaaactattggagcgggccgtgggaaatgtgattcagaacagcatcaggcacagtggaaagaatggaaagtgcaggatagaggtgcaattaaaagacatggagcagcagtgccagattgtgatcacagacaacggaccagggttcccggaagaagtattgcgccgccagggagaccagcagatggaggtaggaaacagccacgggctgggactgaaaatcgtccagcagatagccagggcgcatggaggggagatggtgttggcgaacggagataagggcgggagagtgacaatagagatccgcagacagtgaaaaagggacagggcaggggggaaagtgggacgtgttctttctagaaagaacacgtcccactttcccccctgccctgtcccttttgaatttatgttgctattcctgagaattcccgttacaatagaaaaaagtcaaattttaaataagcaggagagttagtgtgaaagaaagtaaattaagccaaaaacgtgagatagacacaaaaaaaggctcacatagtgaaccgaattaagagtattcccaccttggtaaaacgaggcgcacctgcacatcaatagcaaacgggtggatgcatctgacattgatgccgggatgccttataattaagtctattgtaacacgtaaactagaaggtggaaacactttcattactatttgtgccgcgcccgaaggcgcgcggaatggagatttatatgagaaaagaagcatcccttgatttatggcacgagttatatgatgttaccctgaatctgagagccctggaaccatggaattatttttgggactcagatatagttgcgattgagcttgcggagggggaggaacctgttttctgcagtattatgggtagagggggtgtctgctgcggaatcagtgtctatgaaggatttagagggttagaggattttgatatgctggcaacttctgacaaagatggattctccccggaatatgctatgagtgatcagaactgtctcacttgttactttggggaccgcgaggaagtgtccagggaacagaaggagattattaaaaacctgggactgaaattcagaggcagaggcaactggatttactttgagtctttcaaaaaacggtattcgccgtacctcccggatgaaagagaagtaatggttttgctggagacgtttaaaaatttgttcatgtcggtccgtgcggtgagggaagatcggatacatattaactgggacaacggagagatgatgtacagacgctataacaaggagagggaagaatggaatacatttgcggttccccgtccaataacgaagcggacatatccggaatataagctttcagatgagattcagaaaggacggctcaggaaaaagcccaaaatcaactgtgagctttctatggattttgtatatatgaatggcgctatacatgacgaagcatatgacagaccggtgaatcccctgctgcttgtgattatggatgagatttcagactatataattcatatggagccgataaaacctgaggagaatctggcggaaaaagcactgcagtttttctgcacattcacagagcagaacggacgggcaaaggccgtaaggtacagaaatccatggatagctgcggcgttaaaggaaacctgccaatactttggcactaaactgacaaaatcttccctgggtacaatggacaagatgatccaaatgatgagggaacagatgtagtgaaacagcagacctgaaaggaagggagaagtgcattgaaacagctcttctcccctccaaatgtttatccctattttacttctaccaactcatattccttctgtccaatgcccagcttcaccgcatggtcaatggccgctttccagtccgtctcagggaagatagcgccaaagtgatcatgtccttcatggtcacattccgccagatatgtatttgccagcaccggctgtgcgtttacggcatcggcacaggctacatccagagccaccggatcaaaggaggcaaacattcctacatccggcacgatggccgcatcattttccccgtgacaatcacagtagggagaaacgttcatcacaaggctgatgtgaaagttcgggcgtccgttaatggcagccttggtgtattctgcgatttttcggttgagaatatcgtaggactcgtccgttgccgcctttaccgcatcttttgggcaggcaccgatacagcgtccgcagcccacacatttgttgtgatcgatggaagcctttttttcagataccgtgatggcgtcgtgagcgcacattttggtgcacatcttacagcctacacagagttcccgggctacatggggtttgcccgcactgtgcatttccatcttaccggcccgggaaccgcagcccattcccatattcttgagggcacccccaaaacctgtggcctcgtgccccttaaagtgcgtcagggaaataaatacgtccgcatccataatggcccgtccaatcttggcctcttttacatattcccctccttccacaggaaccagaacatcgtctgtccccttcaggccgtcagcaattatcacatgacatcctgtagaaaaaggagaaaatccattcagataagcgctggaaatatgatccagcgcattcttgcgcccgcctacatagagggtgttgcagtcagtaagaaagggctttccgccaagctctttgattacatcagccaccgtcttcgcataattcgggcggagaaaggccagattccccggctctccgaagtgcatcttaatagcggtatacttgtcttcgaaatcaatatccccaattcccgctgtcttaatcagccgctccagcttctgaagaaggttatctccgatacgagtccggagattggtataatacacttttgacatttccataaaaacctcctaatatattagattgcgatatttcgcaaatgctattgtataaattgtatcattaatgataagatagtacaagaataaaaagggacagggcaggtgcaaaaggggacgtgttctttccagaaagaacacgtccccttttgcacctgccctgtccccaacatacaaaggagagaatattctatgagcaaatctgacaagttactatacctggaatgctattccggcatcagcggggatatgacggtaggcgcactccttgatctgggggccagagaggagatcctccggcgggaactggctaaactccctgtggcaggatacgagctcaaagtgggaagagctaaaaaatgcggcattgacgcctgtgatttcgacgtgattctccaggatgaatcgtcccatggggagcacacccacggtcatcaccatcacggggaacatactcacggagactcccatatacaccaccatgaacaccgcacctacggcgatatcagcaggatgcttcaggaaagctgtctggaggaaccggttcttgagatggctaaaagaatttttcgtgtggtagcagaggcggaggccaaggttcaccgcatgcctttggaggaggttcacttccatgaggtgggggctgtggactccattgttgatattgtggctgccgcagtatgccttcacgatctgggaatctcccgggtggcggtgtctgtgctccatgaaggtacgggaaccacctggtgccagcacggaagaattccggttccggctcctgcggttctggaaatgatggcaaggtacgaattgccggtaaagataaccgagaatgaaggcgagatgattacccctaccggcgctgctattgcggcggctctgcgcacggaggttgcactgccggagcagtttgtggtgaaaaaaatcggtatgggggcgggaaagaaggaatttgcccaggctaatatattacgggctatgattctggaaaccaaagagtcctccggtcaggaaggcacaaaagaaggcaggaaagaagacacacccaaggagagcgtctgggtactggagaccaatgtagacgactgcaccggggaacagctgggctataccatagaacagctgatgaacgcaggcgccctggatgccggctgctttcccgtgggaatgaaaaagaaccgccccggctatatgcttcaggcaatctgccgggaggacatgagagaatccctggaaaatctcattttcaaggagaccaccagcatcggacttcggaggtatcaggaaagccgcagagtcctagagagagaattcgtggacgcagacaccccctggggaaccgcaaaggtaaaggtatgcagccatcacggagagcgctactattatccggaatattccagcgtaaaagagattagcaaaaaagcggggatttccttgaaagcagcctatgatgagatacaaaaggcggcagaaccaggggaaaggacagaagaatgaaagataagagacaacggctcacagagattacagacacttttgcgaaggaagatatctgcattgctttctccgggggcatagacagcagcctgctcctctgtctggccgcagaaagtgcggcaaggcacgggacaaaagtccacgcagtcacctttgacacggtccttcacccgcgatgcgacgtggagattgcaaaacgtgtggcagaagaggcaggggctgtccaccacatcattgaggtcaacgagctggataacccagagattctggaaaatccccaaaataggtgttacctgtgcaaaaaaacactgtttgggcacctcctggactatgcccgggaaaacggcatatcccacgtactggaaggaaccaaccacgatgacctgtcttcgtaccgtcccggccttcaggccatccgggagctgggcatcgaaagccccctggcccgggcagggcttacaaaggaagagatccgtcagtgggcggaggagatgggaatctctgtggcaaggcgtccttccactccctgcctggccacccgccttccctacggcacaaggatcgagccaggggttctgcggcagattgaagagggagaggcatatctccgggcaaaaggctatgccaatgtgcggatccgtgtccacgggagcatagccagaatagagattgacagggaagacttcccccgatttatgggggaagtccgggggacggcagaacatatcaaacagctgggattttcctatgtgactctggatctggaaggcttccgatccggcagcatggacgaatagcagagaaaatcctcaaaaaaggaagggtgatggacatgaataacagcaggatccttttgatagacgatgaaaaagatgtgctggacctgatagaggaagtacttcgaaaggacggctttcaggagatacaaaaagcgtataccggggaggaagctctgcgtatctgccgggaattccatccggatgctgcagtgctggacgtgatgctcccggacactgacggcatcgaattatgcaggaaaatacgtgaattttctatctgctccatcctgtttctgtcctccagaaatgaagatatagacaagattctggggctctccgccggtggagacgattatattaccaaacccttcagccccagagagctggtcttccggatcaaagcgcagctgcgccgccagcagtaccagaacacagttcagagttctgtccttttaaaagcaggccctcttaccctggacacggagagctgccgcgcctataaaaatggggaagagctgagcctgaccgggcgggagtatcttcttctcctgtgccttatggaaaatacagatcgtattatcagcaaagagcgcctctatgaacaggtctggggagaatacagcagcatctgtgacaatacgattatggttcacatccgacatttgcgggaaaagctggaagacaacccctccgatcccaggcagcttgtcacagtaaaaggcctcggctacaaattaaagaaaaggactgagtaaatgagaaaatccggctaccgcaccatgctccatatttatctgatattcctcactgctctgctggttacagccgcggcggcgatcggtctttcctattcccttattaccctggagaaaccggggggagggactgttagaagtgactggcccgcagcctttggggaagcatttaaggaacaggtagtccccgaaggggagatttcccatgtgaagtcatccggactggagcttctccaaaagaatcagattgggctgcagatcctggactctcaaggaaaggagataacaagctatcgtaagcccgcaaaggcaaaggaagcttacacccaggcagagctcttgcagattgacagagccggatccctgaagcagtctgacacagctgtctatgtgggaaccgcaggaaagggggagaagacctgcatgtatctcctgcatttccccataaaagtagagaaaattaccatgtatgtaaataaagacagatttacagggggaaaggctatggtcctggcctccgcgggaattcttttcgccgcagtccttctggccggccttctgtacgggcttaagactgccgggaacatgagacatctggccgaatgcatcagagatatctcacaacgccgttaccttcccattcaggggaggggaacataccgggagctatatgacagcctgaatgccatgtacggggaacttcaggaaagcgaccgtctccgggaggagactgcggatatgcagagagcatggatcgccggcatcacccacgatttgaagactcctctgtctcccatccgtggctatgcggagatcttagcagacgagggagaaaaggcggggaaagactgcaggcgttatgctaaagtaatgcttcaaaatgtggaccgtatggaaagcctgatggatgatctgaaagttatttatcagctggaaagcgggagtctgcctatggattttagagaacagaacctggtgcggtttctgagggaactggttatctgcctgcttaacgatccaaaataccaggaccggacgattcattttgtatgcacagaagaagaactgccggtttcctttgaccggaagctgctggaacgggccgttctgaatcttatggtaaatgctttcgtacacggagactcggaaacagaactgacactcaaggtatctgccggggatgggaatcttgagatagcagtgtccgacaacggcaggggaatgacagagggggaggctgccagagcatttgaccggtacgtacgggggaggatcacagaacaggggcaagagggcacaggcctgggtcttgctatcgcaaaagaagttgtagagcttcacgggggaaccattgaggcgtccgccattccgggtacaggaaccaccttcctcatccgttttcccttcccttaaggttaattaaggttgtctgaaactcagcttaaggctgacagtttatcattatggtatgatagctgccggccttttttgatcctctacggagaaacaaaaaacaggagcagcgtacaggaggtgttcatttgaaaatcattatgaaatacattctaacgaatgtgaaagaacgcaggacaagaactgcggtcatgctgttgtccgttatattgtcatctgccctgctgtttgtctcgtgttccatcagtgcatcctatgaaagcgcacagagaaaaatggcccggggaatatcggggagtgccgccgctgtggttcgtcccgcaggggaaagcgggagcatagacggtgccctgattccagatctgccctctgtgggcgcaaaagcagggattttaaaaggaagttccgtgtattacgagagcgggtattatgagaccgtggatcttattgccgcagaactgagacagctggagaatatcaacaaaccccgcctgacggacggcggggaactgagcgagctctctcccgggcagattgttcttccggaccgttttacctcaaagttcggaattcagagaggggatactgttaccctcagggtaaatgggaaccctgaaagctttacggtggcagaaattgccgcttatgataccctgttcatgcggcagacaagaggggccaccgcacttttatccctcccggatctggccgggatcctggggaagacaacagggtacagcgagattcttgtaaagcctgcagaaggggtaagccgggaagcgctgatcgcagatctgaaagaggctctcccgggggatatctgtgaggtgtcagaagcggcagatgaatcactcatcgaagccggcgccaggcagaaatccatgcccttttttctcatcagctttttctctctgaccatgagcgtttttatcatttacagcagctataaggtgatcaccctggagcgtctgcccattatcggaaccttccggagcatcggggcgcccaggaagacagtaacaggcatactgctgctggagagccttttgtacggaagcatcggggggctgctggggatacccgccggtatccttgtgctgaagttaatcctccgtgggatgggaagctccctgtcaggaggaattgagattcccgcagtctgcccgcctttaggcattatcctgtcattgtctgcggcggtcacggtttctctcctgagcgcctggatccctgcatcccgggccggccgcctgcctgtgaaagaggtagtgctggggaaaacagaagagaagacccggcccgtccgtcttaccatgggaatcggtgcaactctctttcttgcatccgctgcccttccccggctggtctcaggtaccatgaggtacgctgcgggagtgttttctcttctgggcctgattgctgcagccatcctggtgattcctctctttgcagatctctgctccatgggcctggaacgcctgtacggccttctgtttgggaatgagggcaggctcgccgcacgaaatcttaagggaaataagagcattgtccagaacatcactctgctgtttatcagcatatccgcagtgatagccattcaagtggtgggagattttgtaacagcctatatcacagatgtattccgggacgcagagctggagggatttgcagacgggcccatggaccgggaatttgtgcaaaaggtggaacatatggagggcattcaccgtgtggttccagtctatgtatataataatgaaattgcagcagatcagacacccctgccccgggcagaggctacagaggatctggaagcctacagctccatgttcgggctgacttatacagaggaagggatggagacgcaggctgcggccgccttccgggataagcgggcagttcttctcagcgaagagtgcctgaaacaaagggacctctcattgggggatacacttaccctgtccgatggagacgtctcctatccctatacggtgaccggcagcttcaagtcacgcgccacagatgtggaggcaatcattcccgcttctatggctgtatctgatttcggcaaagaaaggtatggactgctggcctataccgcccgggatccggatgggattatggtacagatccgggatctcttcggagaaacctccaactggagccggaccacagaagaattcaaccaggacgcgctgtctactgtggaggcattccttcagcctatgcacagtatgacttactttatactgtttctggcagccgcaggggtgatcaacaatctgctgattcaatatatccaaaaccggcgcaccgcggccatgtacaaatccgtgggccagagccgccgccagtacgtaaggatgacgctgctcgaaggattttcggccggacttatgggtgctgcagctgcggttgcagtctcttatgtggaaatacagaccattttccttgtggcaggacctaaaattgctatgcagccaaggctgcatgggtctgtttttctggcggcaggagctatgggaattgcagtgaacatggcagggtgcctggtgcccctgattaaaaatagaaaaatgaaaatcgtggaagaaattaaatatgaataagcagtcaggaggaatagaagatgagagtattcaaagaaaagacagccgtagcgtgcagaaatattgtaaaagaatacagcgtgggcggggagggagtcagagtactggacgggatctccctgaaggtctgcagcggagaatttgtctccattatgggggaatccggttccggaaagagtacgctcctctatatcctggggggactggacagacctacagagggagatgtctgcataaacggcacggatatctccggtctgtccgatgaaaatatgagcaggatgcgccggcaaaagattggatttgtattccagttctacaacctgattcccaatctgaacgcggaggaaaatattatgctgcctctgcttctggacggaaagcgggctgtggattacagcggccggcttgcccagatgctggagctggtggggcttacccagcggcgaaagcatacccccagggaactttccggaggacagcagcagcgggtggccattgcccgggcacttatgagccggccggagatcctttttgcggacgaacccacgggaaacctggacagccggaccggggcagagatcatgtccctgctggaagagattaaccgggagaggggacagacgattatcatggtcacccattccccggaagcggccaaaagcagcagcaaaatcattaccgtacgggacggaaagctgaaggaataatacaggccggcctctgctttttcacctccgtctcgaaattctttaccgatgatccagaagaaaaaaattgtgatataatacaactgtttaaacgcttaaacagaaaggagccgggtatggaacataaggcagacgacataaagaaactacaggaggaatttatcagctgccaaaagcttctgacagctttgggagacagcaacaggcagcacctgctctgtattatgctggaatgcgactgcagcggaagcagggtgattgacattgcggaaaagacaaacctgtccagacctgcagtttcccatcatatgcagatactaaaagacgccggcgtggtaaaatccagaaaagaagggacctgcatctattattatctggatccctgtgacaatgaaatcggaaagatcatggaattatgtgcccatatcagggcaattatgaagtcagtgcccgacagaagcggggaagaataaggggaggagtgtaccatatgatattttatttttcaggaacaggaaacagtgcttacattgccaaaaagattgccgggctcacaggagacagcattctttccatgaacgaacgcatccggaagaaagatatttctgaaatttactctgagaacagcctggtgtttgtggtgcccacgtatgcctggaggatccccagagtggcagaggagtggatccgccggacttctttcaccgtgaatccctgtgcctatttcgttatgagctgcgggggcagcatcgggaatgccggcaaatatctgcggcggctttgtgagcagaaaaaatggaggtatatgggtgcggcggagattgtcatgccggaaaactatattgccctgtatgaggctccaaagaaagaggaagcaatacggatcatagaacaggcagagccctccatcctggcggcggcagataacattcgaaaagaagcgccgtttcccgggaagacggtcacattaaaggacaagatagacagttcccttgtgaatgatgtattttatcctctgatcgtgaaagcgaaacagttcagggcagaggatacctgcacaggctgcggccggtgtgtcaaagagtgccctctcaacaatatctccctgaaggataaaaagcctgtgtgggggaatacctgcacccactgcatggcctgtatctgcaaatgtccggcagaagccattgaatacgggacgaagagtgtgaataaagtgcgctaccagtgtccccggtaaagggaggtgtgagaagtgattttttatttttccgcaactggaaactcaaagcatgcggcagaagtcattggaaagaaaacaggtgaagagctgaaagatatcacagagtgtgtgaaaaaaaccaatttgcttatcaggtctccggggaagaacggatcggcatcatatcccctacctattgctgggggctgccggccatcgtaatggaattcctgaaaaaatggaaggtggaggcgcaggacaatacctatttttactttgtgactacctacggaaccaccacaggccagtcgggaaagcgggcagatgaatacctgaaagtaaaaggctattcctttgctgcatactattccgtaaaaatgccggattcctggacgccgatctttgatttgtcagatcctgaaaaggtaagaagaatcaatgaaaaagccgaagaagagatacagcagaccgcagataagataagcctgaggttcccggggaattatatgcgtcacagaattcccgattttgcgtccaaaatctactataagacttatgatacaaagcgcaggacagcccacttccgggtggaggacagctgcatcggctgcggcctgtgtgaaaagaaatgtccggcggatgccattaccctgagagaagggatccctgtgtggaccagggagaagtgtgttatgtgtctggggtgcctgcaccggtgtccccggttttccattcagtatggagaaaaatcaaagaaacatggacagtacgtatatcccggcaaataataggtatgagcaggggcggcgctctgccaatcaggttacggaacgatattgagagcatgggatgaaagagagtgaactgcttttatgtagaaatatattgacaaacatctatatgtcatctacaatggacacatagacaaatatctatgtgaggtgaatatatgaatacgatggatattgcattgatatgcaaagcccttggggattcaaaccgtctgcagattgtgcagatgctgtctgatggggaaaaatgcggctgccagctgctggagaagtttgcaataacacagccaacgctgtctcaccatatgaagatcctgtgggaatgcgggttggtggaagcgcggaaagaagggaagtggagccattattctctgaactgcgacacactgacgggatttaaaacatttatagaaggcctgtcctgttgtaaagacgggggtgacggcaagtgatatgggagtttatccaggaacagatacttgggatgaagtggctgaatgaatggattggcaggctgctgaacggcgcggggctggatacagcgtcacggatgggaggcagtgttcagttctttctttatgacgttctgaaaatcacagttctgttatgcatcctgatttttttcatttcttatatacaaagttattttcccccggagcgcagcaaaaagattatgggacgtttccatggaatctgggccaacgcaatggctgccttgctgggtactgtgacacccttttgctcctgctcatccatcccactgtttatagggtttacaagcgcgggacttcccctgggggtcacgttttcctttttgatttcctctcccatggtggatctcgggagcctgatcttgttaatgagcattttcggcagcagggtagcggttatatacgttgctgtagggctggtgattgccgtggcgggcggtactttaattgaaaagcttcacatggaaccttatgtagaagaatttatccgcgaagcagggggagtggatatcgaagctccgtctctgacacagaaagaacggctgtcctatgcaagggagcagttgatctccacctttaaaaaagtgttcccctacatcctggcaggcgtgggaatcggcgcgatcattcataactggataccggaaagctgggtagagacggttctgggcagtaacaatccctttggagtcgttcttgcttcactgattgggattcctatgtatgccgatattttcggaaccattccggtagcagaagctctgctgtataaaggcgcgcagctgggaactattctggcatttatgatggcagttaccacacttagcctgccgtccatgatcatgctccgcaaagccgtcaagccaaaacttttggggcttttcatcggaatctgtacggcagggatcattcttatgggatacttgtttaacgcatttcaattcttagtgttataaggaggatgagaatatggggttaatgaagaaaaaggttgcgtttctctgtgtgcacaattcctgcaggagccagattgcggaagcattgggaaaacatctggccaaagatgcttttgaaagctattccgcgggaaccgtaacaaagccgcagattaatcaggacgcagtaaggattatgaaagaactctatggaatcgatatggaacagacccagtattcaaagcttatatcagagatcccaagcccggatattgcagtgtccatgggttgtgaggtggaatgtccatatatcggaagagactttgatgataactggcagttaccagatcctacgggaatgggggaggaaagctttattgctgtcataaaaaagattgaggaaaagattatagagttaaaggctatgttaaagtagaaactgccctcagaaaaagagccggacgcgcgcatgacgtccggttctttttctgaggctttatcccagattctctcctatcaccttctctaccgcattcacaatattctggtacccggtgcatcggcagagattccctgccatgtgctttttgatggcttcccgggtgatcttttccccacgttccaggagaaccgtggcagacatcacaaagccgggggtgcagaaaccgcactgaatagccccttcctcgataaacgcctcctggatccgtgtgagctctccgtctggtcccacaagcccctccagggtgcgtatgtttttgccgtccgcccacacggccaggtaaatacaggaatcaatggtttccccgtcgatgataacggtacaggcgccgcattcccccacttcacagcccttcttcacagaagtaagccccagccggttcctcagcatatccagcagagattccctcacatctacatactcagcgatttcttttccgttcacggtacatcgtaccagctgcatctgtttatccatgatctagccctcctgtctcttgactgctttttccagtgcccggcgggcaatctccccgccgatctgaaggcggaacttcttcgaagccctccaggaatccctgggattgatttcctcacgcaccgcatcctctgccagctggtacaggctttctcccacaacacgccctttcagcttttcctcagccgctctgcaccggaggggaaccggagcggcgacaccgaaggtaatcttcacatcttccagtacccgggtcataggctctaccctgcagaggacggagcagcttaaggtagcaatatccatggcatttcgcatggaatacttaatatagtatccgctgtatccctcataatgggatctgggaaccacaatgtgggtcagaatctcatcctgcttcagatccacacggccgggacctaagtaaaagtcctgaatggaagcggtccgcatccccctgggactggcaatctccagaagcacctcaagggaacaggccgtgggagcactgtccgcgctcaccgctccgttgcagagattccctccgatggttccgatgttgcgcacctgaggaccgcctacctggtccacggcttcccccaatacgggaatatatttctgtatcacgggatccccggtaatatggctgaaggtagtggctgcgccgatgcggatatctccgtcctctgtgagaactacaccgtacagctcgggtatcttccgtatggataccagctcacagccggccatcttcccctcccgggtcttgatgagcacatcgcttcccccgcagataatcctggcgccggggtgttctgccagaagggcagcggcttcatcgatggtatttgcttcataatagcctgtaatatcatacatggcctttccctccttctatagtaatcctgcctggtcaaaggcatcaatgagtttctggggtgtcagaggattcgagttaacagcaacccctgtggcgtggagcaccgcattgcggatggctggagctgtgggaatcgccggaggctcacccagggctttattcccgtaaggtccggtgggatccggctcctccacaaactccacggccagatccggtgcgtccagagcggtctgaagcttgtagtccagaagggtaccgtttaacacccggccggtcttgggatctataagcatctgctccgacagtccgtagcccagccccatggacattccgccgtggacctgcatcgtggcaagctggggatttaaaagcgtgccgctgtcgtgaacctggataatatccagaaccttcaccttgcccagcttcatatccacctccacctccacaaagcaggcgccgaaggagagggcattgtcttttgtctgcagagatacctctgcggtgatagcggaagagttcgtaagactgtaatagctctccatagccacttcctccagagaaatagcctcttccccatccatataaatcatcttccggtccagtgtcagttccctgtcggtatcgttaaggagtgttctggcataggccagaatcttttccttcagctggagggcgcactgcttcactgcattcccggtgacataggactggcgggaagcataggctcctgtgtcaaagggcgtcacgtctgtatcctggttggtctggatatgtacatcggcagggtcaaggcccagggtctccgcggccatctgggtaaatacagtatccgcgccctggccgatctctgtggcgcccaccatcagctgcacgctgccgtcctggttgagcaccagccgggcgccggagatctccagggaaatcggccatacgccggttttatagctgaagattgccatccccacaccccggcggatgggaccggtctggcgggcataggccgctctcttttctttccagtgaatatattttgcacctttgtccatacagtccaccacatgattcgtattagctgcaataggagtgaggaagggatcggcaaagaaccctttgtatacattcattttgcggaattccagcggatccatctgcagcttgtatgccgcgtcgtccataaagcattcccctgcaaaggcaaactggggaattccgtacgcacgcatggcgccgcccaccgggcagttggtgtacactgtataggcagaggcccgcacattcgctacctcatacatatgcctccaggcggtagctccgtttgccacaatggcatggccatgggaggcgtacgctccctggttggagactgcagtcatatccttggccagtatccgtccgtccttacgaactcccataacaaggtcatagtggatggaatggcgggttctggtgttgcagaaggtttcctcccgggtaagttccagcttcacggtccgtcctcccacctgggtggtgagaaaggcattcaggggttcgtagagcacatcctgtttattcccaaagcccccgccgatgtaaggcttgatcacccgtaccttcccccaggggattcccagggcctggccgatgacccgctttacaatatgagggatctgagtggaggtcactaccacaatccgtcccttgtccatatacgcgtaggagacaggattctctatatggcagtgctgtatgatgggagtgtcgtaggttccgcgtacaatgacatcggaagcttccagtgcctcatccacctttcccagctcataattgctctgtgccagaatattatccggcttttcctcgtgcaccggaggcgtggtgcccttcatggcagtgagcggatccgtgacaggcggatactcttcatattctacttcaatgagctttaaggccctggaagcagctacctcatcctccgcaataacagcggcaatatcgtctccgtaatagcggatccggtcggtgagaagactccggtcagccacatcctgatgggccggctccacagaccagggatggccgggggtggggaacttcgtgtcaggcacgtcccggaaggtaactaccttcactaccccttcgagggcctccgctttgctggtgtcaatggatactacacggccatttgcaatagaagcgtggtacactttggcgaccagacatttatccaaaatcatatcgtccgtaaactgtgctctgccggtgactttttcataggcgtccacacgggggatactcgttccgatggtcatatacatcccttcctttcttataaataaatcattgcttagaggtattataacatactggagagagagttccaaatagaattagcaaaaatattttgataaatacaaaaaaattgttatctgtacatggtaaactatttgcgaaagaatcttatatggccttccctgtttatccgcatatttttcaggaatttatgaaagaaatataataaggaataaattgcatggtaataaggaggtttttttatgtcagaaacagtatttggctatatcagggtatcatcaaaggatcagaacgaggcgcggcagctggcttccctgaaggagtatcacatcccgccgaatcagctctttattgacaaacaaagcggcaaagactttaaccggccggcttaccgaagactcatgcgccgcataaagccgggagacctgctgctggtaaaaagcattgaccgcctgggaagaaattacgatgaaatcctggagcagtggcggattctcacaaaagaaaagagggcaaatgtactggtgctggatatgccccttctggacacccggacaaggggaaatgaccttaccggagtattcatcgcagacttggtcctccagatcctgtcatatgtggcccagacagagcgggaaaacatccgccagcgccaggctgaaggcatcgcggaagccaaacggcggggcgtccggttcggcagggctgaaaaaccaataccggaaggatttgcagacattgtaaaaaaatggagaaaaaaagaaataacctgcgaggaggcattggaaaaattagacataagcagaagctatttcttcaaaaaagttaagcaacttcaactataaacaggcgaaaaaagcagaaaataaaaaaagagtacatataagattatatatgtacacttctctgtactctgcaaaatgcgacaatttatgctaaaatagctaggtatattataacaaataaacgaaataaatcaagtgttttaatgtgtactttgaaatacttgcatttttattaaatctagtataatatattaatagttatttagcaagaagtcatatgaaattctttgttcttgcagagtacattagtgtacactaggaaaaactgctgtttatagagtagcagaaatgcaaaagatacagctccggcaaaatcagtgaaagctggtggcgcaaagctagagggcctaagcttacaaagagtatggcagccagttgcacaatatcatggcatcacttaaaaaattgtcttacaaaagatatcgtgagagagcttatagtaaaatgcgaatcataagctctttttttgtgcgcaaaaaacacaaaaaaagtaagaggaatcataaggagtttttacggaggagaaggtgaaagtatgaaatggtttttaaagacagcggcagtgttgggcagcatcgcctgcttaacctgggggtctgttctggttatctttgccagaaacagtgaagtgagcaaacaggcagttacatccctcagttcggctgtagatcccaatctggctattatagcggccgggattgcagcgcttgcgggcatcattgtatatgcaaaaaggaacagaaccaaagagaaaggataggaaaggtggcggtgtgtcaaagcatcgccgtttttcgtgggataaagcaagaggcgggataatttatgagtgttaaaaataagaaagataatgtatggatacagagagctctagtgattgtattcatggatatactggcagttctggcatcgtatatgctggcgctgtttatgcggtttgactttgtattttctaaaataccaagagtttaccttgaggggtatctctggtctatgcccttttgggtgatatctacggtggtggtattctatgcctgccgtctgtatcacagcatctggcgtctggctagtgttgcagaggtgagaagaatcatcgctgcatacataattctagtgcccattcaaatttttggcatgctgtttatgcatctgcgcatgcccagatcctactatttcatgggatatattatctgcctgtgcctgacaacaggaatccggttttcttacagactcttacggctgtataccagccggagccggcaggatggtcctggtacaaaggaacggatcatgattatcggggcaggttccgcgggtcagatgctgttaaaggaattattcaacagcaggcgtctgcactcgaaggtatgctgtctgattgatgacaatccatctaagaaggggcgtttgttagaaggggtacccatcgttgggaacagaaatgaaattccagatatggtgaaagagtataatatcaccagcattatcctggcaataccggctgcaagtgcgaaggatagaaaagaggtccttgaaatatgtaagcatacaggatgcaagctccagattctcccgggcatctaccaattggtgaagggagaggtaaaggtcagtcagctaagagacgtggaagtggaagatcttcttggaagagaacaggtgaaggttaataatgaagaaatctttcatgccatcggtgggaaggtggtcttggttaccgggggcggaggttccatcggaagcgagctctgcagacagattgccaaggcaaagccgaagcagctgattatatttgacatttatgagaataatgcgtatgatattcagcaggaacttttaaggacttaccctaaagaggagctgaacctgcttgccctgattggctccgtgagaaacacgaaccgtctgaactgggtcatgaatacctatcgcccggatatcgtattccatgcagcggcccacaagcatgttcctctgatggaggacagtccgaatgaggcgataaaaaacaatgtgctgggcacctacaaaacagcagtggcagcctgccgggccggggtaaagaagtttgtgcttatctctacggataaagcggtgaatcctaccaacatcatgggggcttccaagcggctgtgcgagatggtggtgcagatgatgaaccggcagtatgccaatacagattttgtggctgttcggtttggaaatgtgctggggagcaacgggagcgtgatcccgctgttcaaaaagcagatcgcggctggagggccggtgacggtgacggataagagagtgatccggtattttatgaccattccggaggcggtgtccctggtgctgcaggccagctactacgccaagggcggcgaaatttttatcctggatatgggagaaccggtgaagattgatgatatggcaaggaacctgattcggctgtccgggtatgtaccggacgtggatatccctgtagtttatacggggctgaggcctggagagaagctgtatgaagagcttctgatggaagaagaagggttgcaggagacagaaaatgagctgatacatataggaaaacctattgaaatggatgatgaatggtttaagaagaaactgaggcagttggatgaggctagttttagggagagtggggagatgaaggagatcgtggcggagatagtgccgacgtatagtccagagaagtaaaacagttattaacaaccttagggtggcttttgagaacctgaggcccattttgagggcgttgatatatagaaaaacgaagcaatgtggctgaaaaatttgaaatgaatgatgagacagaaaaaagcaactgacaattattacattggaacaaacaaaattgttagatggggaatatgaaatgttcaattttgataataacaagtttgaaagatttgggaaaaaattgtttttggcttctccgacaatgcatggagaagaactggaatatgtgacggaagcttaccggacgaactggatgtctaccgttggagaaaacattaaccaggtggaggctattgcttgtgaaaagatcggatgcaagtatgcagtggcactttccgcaggtacggctgcattacatatggctatgaagcttgccggactggaattgtatgggcagcctgatgttggacacggctctttagagggaaagcgggtttttgccagtgacatgacttttgatgcgaccgtgaatccgattgtttatgagagcggcattccggtattcatcgatacagaagcagatacgtggaatatggatccggttgcactggaaaaggcatttgagatctatccggaagtgaagttggtggtgatggctcatctgtatggcacaccgggaaaggttgatgaactgagggctgtatgtgataagtatggggcaatcatcattgaggatgccgcagaatctttaggcgctacatataaggagatccagacaggcaactttggtaagtataactgtattagttttaacggaaataagatcattaccggtagcgcaggaggaatgcttctgactgacagcctagaggcagcagataaggtgcgcaagtggagcacacagagccgggaagcggcggcgtggtatcagcatgaggaactgggatacaactaccggatgtccaatgtcatcgccggggtggtgcgaggacagttcccccaccttgcggaacacgtcgcacagaaaaaggcaatctatgagcgctacaaagcgggtctggacggcctgcccgtgcagatgaatccgtatgatgtacagaacagcgaaccaaacttctggctgagctgcctgatcatcgacaaagatgctatgtgcaggcaggtacgcggtgaacaggatgtttgttacataaaagaaagcgggaaaagctgcccgacggagatactggaagccatcgcatccatcaatgcggaggggcgtccgatctggaaaccgatgcacagacagccaatctatcgtttaaatccgtttattgtgagagacggaagaggacgcgccagatcgaatgcttatattgcaggcggctgtgaggatgtcggtgcggatatctttaaccgtggtctgtgtctgccgagtgataataagatgacggtggagcagcaggataggattatagaagtgatttgggcttgctttgagtaggtggattcgctatggggaataaatataagccttatggcccttatgagaagtacataaaacgtccactggatttttgctgtgcactggcagcagtgttggtattctggtggctctatctaatcctgatcatacttggaacgatttttatgggcggtaatcctttcttcacgcaggaacgtccgggcaaggatggaaaaatttttaagctgatcaaatttcgctctatggataaccgaaaggataaagatggaaatctgctgccagataatgtaaggttgaatagatatggccgcctaatccgaaaattgagtttggacgaaaccatggaggtatttaatattctcaaaggtgacatgagtattgtaggtcctcgccctcttttgaagcagtatataccactgtacaacgaacgccaggcgagacggcatgaagtccgtcccggtctgaccggatatgcacaggcgtatgggagaaacagcctgacatgggaagataagctcgagaaggatgtttactatgtagaccatattagtttcctactcgatgtgaagatactgttcaagacggttgatgtcgtgctaaagcgcgaaggtattagcagtgagaccagtgccacaatggaagaattcaggggcagttcagatgcggaaacaggcagttcggagatgttatcatgaataaaattgtgattataggtgcaagcggtcatggaaaagtggtcgcagatattgcaaagcaaaatggatatacagagattgtctttttggatgatgacgagagtgttcaagaatgcggtgggtacccggtgattgggaaaagttcgatcgctgaaggaatcaatgctgatgtcatagtggcgattggaaatgcagcaattcggaaacatatccaggaatcgatagacaagagccggattattacactgattcatccggatgcagttgtggcggatgatgtgataatcggtgtcggaactgtggtcatggcgggtgctgtggtcaattccggcgcgaggattggaaaaggctgtatcattaacacctgttcatccgttgaccatgactgcaccgtaggcgactttgcgcatcttgcggtaggtggtcatttatgcggaacggtaagtgtgggaagtgaaacgtggattggtgccggagtgacggtaagcaataacgtcaatatctgcggaggatgcatgattggtgcgggtgctgtagtaataaaggatatccacgatcctggaacatatattggtgtaccagtgaggaaaagcaaatgaaaatatggattctcaatcattatgcgagtgatatgtacttttctgaagggggaagacactattatattgcaaaatatatgaagaagatgggacatgaaccatctatattttgtgcaaattcaaagcataatgataataaaaaattatattttgatttagatggtacatgggaagaaaaaataaacgatgcaacgggtgttccatatattttcgtgaaggttaggccatatggaaccaatggtagtaagcgtattcttaacatgattgatttttattcaaacgtgattcaatcaggtaaggaatatgctttaagaaccgaaaaacctgacattattatagcatcttcagtgcatcctctaacaatgctagctgggatcaaattagcaaaacatcttggcgtcaagtgtgtatgtgaagttagggatttatggcctgaaagcatagtaacttatatgacaaagtttagtcggagcaatccgattattcgagtactttatcgtggtgaaaaatacatatatagacgagcggatgctattatttttaccatggaaggcggctatgattacattagggaacaaaaatggtctaatttaattccaaaatcgaaggtttatcacataaataatggtgttgatctcgaccagtttgaatttaacagaaataattgcaagataagggattctgacttggacgacgagagcattttcaaagtcatttatacaggctctatcagaaaggttaacaaccttgggacgcttcttgacattgcaaaaattattaaaaaccctcgtataagatttcttgtatggggcgatggagatgaactggagaaattaaaagaaagagttgacattgaaaacataaacaatgtggtttttaaaggccgcgttgataagaagtatattccgttcataacttccagtgccgatttgaatttagctcataataacgagtcaccaatattcagatttggaatcagctttaacaaaatatttgattacttggcagccgggaagccaattatttgtgatttttatgcaaaatacaatcctgtaatatcaagtggtgcaggcgagtattacaaatctaatgatattcatcagattgcgcatggaatcgaacaattctctcaaatgccacatgataaaattaatgaattctgtgtagctgcagaaaaggcggcacattattatgattttagaaacttaaccatagaattattaaaagttatagatgagaccatgcaagcggaggtgtgattatgaaaaaagtatgccatgtgacaagtgctcatccatctgaagatggaagaatatttagacgggcatgtacttctactgtcaatgcagggtacgatacttatctggttcaaattggagcgtcatatgataaaaatggggtacacattgtcggtatagggaaaccagctaaatcaggaagggtgtatagaatgacctcatttgcaaaggcagcatatcagaaagcgttatctgtggatgcagatctatatctcttacatgacccggagcttttaccatatgttgctaagttgaaaaaaaggggaaaagctgtagtttttgatagtcatgagaactatgtagaacagataaagaataaaccgtatttacctaaaataatcgcttctgctgcctccagtttttttaaattatactccagaagcgttttcaaaaaacttgatgggctaacctacgcaggcaatggggagactcaaacagtatttgatagtatgtgttctaaagttgttccaacggacaacctgccttggttaaatgaactatacgacaaatatgattcttcagtaagaaaagaacaaagatcggcttgctatattggggggttagatgaagtaagagggataacacaagctattaaagcatgctatcaggctaaatgtaagctttatttggcggggcaatttcattctgggttatataaagctcaaattatggcgatgcctgagtattcttgcgtagagtatcttggggtaatcaatcgtaatgaagtattaacattgctgcaaaaagtagaggttggcatttgcacattacttgatatcggccaatattataaaatgcttaaccttccaacaaaagtgtatgagtatatgtcattgagtcttcctgttatccttaatgattcgccatacaataaaaaaattgttgatgaaatacagtttggtgtctgtgttaatcctatagatatagagtcatactctaaagcacttgatttaattctggaagacgaatcattaagagcggaaatgggtaaaaatggacgtgaagcaataaaaaatagatattcatgggatagtgcgcaattgcggctaattgaaatgtataaggcaatattaggtgagtaattatttatttaagagaattgttggaggtaaacaaatgaaatatgcactaataggttgtggacgaatcagcccaaatcacattgaagctacgaagaacaacaaactcgattttgtagctatgtgtgacattctcccagaggcaatgaaggaaaaatcagacaagtttggtttagagaatgtcagaaagtacacagattataaagagatgttggtggttgaaaaaccggaactggtcgcaatcgccacagaatctggaaaacatgcggctattgcgctggattgtattgttgccgggtgtaatgtaattattgaaaagcccattgctctttctatcgctgatgcagatgtaattatcgaagctggcaagaaggcaggcgttgttgtatgcgctaaccatcagaatcgcttcaataaatccgttcagtatattcgcaaggcgctcgaagaggaacggtttggtcgtctatctcatggtgcggctcacgtccgttggaatcgtggcaagaactactatgagcaggctacctggcgtggcacctgggcgcaggatggcggctgccttatgaatcagtgcatccataacattgaccttctccgctggatgatgggtgacgatgtggacgaggttatggcttacacagatcagcttgagcatccttatcttgaggctgaagacctcggtatggcacttgtgaaattttccaacggctcctatggactgatcgagggtaccacaaatgtatatccaaaaaatctggaagagactctttatatcttcgggcaaaagggaactgcaaaagcggcaggcaccagcgacaacatcattgaagagtggagctttgctgacggacttgacgaccctgaatacgtgaaagccacctacggagaaaatccgccgaacgtttatggctttgggcatactccgctttatgccgatgtgattgatgctatccagacaggccgtaagccttacgtggacggcgaagctggaaagagagctttggaaattgtgctcgctatctacaaatctgctgcggagcatcgtccggtgaagcttcctttggaaaactgctccacaatggactttgttggaaggttcggtgaggaagaactgaaatgagcgagttttttgtacatccgaccagtattgtagacgatgatgtcgagattggtgaaggaacaaagatatggcatttttgtcatgtccagtcaggagcgagaatcggtaaaaactgctcctttggacaaaacgtgaatgtttccaacaatgtcaaagttggaaatggggttaaggttcagaacaatgtttccctctatgaaggtgtcgagcttgaggactatgtattctgtggtccttcgtgtgtattcacaaacgatcttacaccgagagcaaagtatccgaaaggccatgcaggttataagaaaacggttgtcaaagagggcgcatcaattggtgccaatgcgacagtggtctgcggatacaagattggcaaatgggcattaattggtgccggcgctgttgttacttctaacgtacccgctcacgccttaatgctcggggttccagcaagaagaaaaggctgggcttgtgaatgtggaaagttattgccagaggatcttgtctgtgaaaaatgcggacggaaatataaagaggcagacgaaggtctggaggaggttaagtaatgcaatttagagatttattaaaacagtatgaggttctgaaagataagattgatgccgctatgatgggtgtcacggcctccgctcacttcatttcgggctccgaggtaaaggagttggaaaaggctctggctgagtatgtgggcgtgaaacattgcattacctgcgcaaacggaacagatgctatcgcaatcgctatgagagcctgggggatcggaaagggcgatgcggttttcattcccgacttcactttcttctcctctggtgaatgccctgccgatgaaggcgcgactccaatctatgttgatgtcgatcagagaacttacaatatcgatcctgcaaaactggaagaatctataaaaaaagtaaatgcggaatgcaagtataaagcgaaagctgttgtagtggtagacctgttcggtctgccagcggattatccagcgattaaggcgatctgtgagaagtatggtttgctgttgctagaggatggtgcacagggattcggcggaagcattaatgggaaactggcctgcagttttggagatatttccacaacatccttctttccggcaaaacctctgggatgctatggtgatggtggagctatctttactgacaatgatgagtgggctgatctgatccgctctatctgtgtccacggaaaggacaccagcaatcctaacgatcctaacgcaaagtacaacaatattcgtctcggaaagaacagtcggttggataccattcaagcggcggttttgctgccaaagttcaaagcatttgttgattatgagcttgctgatgtgaataaggttgctgcttggtacacagagggcttgaaagatacagatttggtccttccggaaactaaggaaggtttctatagctcttgggcgcagtacacggtacagttgccggagagagtggatagaaaggaacttcaagaaaagcttaaagcggctggaattccgtctatggtttactacgccaagcctatgcatctgcaaggagcgtttgcaaacacggacagttcaattgccgactgccctgttacagagcggttgtgtactatagtacttagtcttcctctagatccctataaaaccaaggaagacattgaatttgtagtggcagaacttaagaaagctctgtaatttcctgtttggcagaacagaaatattatagcttatgaagataatatatggggagtatagacatcctttgcgcaagacttggtatatttctggtctgaatacatgtttaagtgttcggttgcaagttgctaactcagggtgctgcgtcttccgacgcaccaagacggtagtcagttcctattcgaatacaggcaactgaaaataaataagaaacaaaggagtaagaagaaaatggatttcaataacatttaccagagactaatttctggcactgagaagctggctttggttggccttggctacgtaggaatgccaattgcagtagaatttgcaaaacacatcaaggtcatcggttttgatattaacgaaaagcgtgttaacgagtataataatggcattgactctaccaacgaagtgggtgaggctatcaaaaatactacagtggactttactgctgatcctactaggttaaaggaagcacgtttcattgtggtcgcagttccaaccccagtaaatgaggataatacccctgatcttctccctgtagaaggtgcatctcggaccgttggtcagaatctgtcagcgggttcaatcgtggtgtttgagtctactgtgtatcccggcgtcactgaggatatttgtataccgattattgaaaaagagtccggactcaaatgtggtgtggactggaagatcggttacagtccggagcgcatcaatcctggtgatcgtgttcacacgctaaccactatacgcaagattgtatctggtatggacgaggaatcttcccgcgaaatcaagaaggtctacgatatcgtcattaaggctggaacatttcctgtttccaatatcaagactgctgaagcagttaaggttattgagaacagtcagcgtgatattaacattgctttcatgaacgaaattgcaattatctgcgataagttgaagattgataccgcagaagtccttgatggcatgaataccaagtggaatgctcttggctttaagcccggtctagtgggcggccattgtattggcgtggatccttattatctgactaatatttccgaaaagcttggctaccatagccagattatcttgaatggacgtcaagtcaatgattccatgggggcttttgtagctgatgctgcaatcaaggaaatgattgaagcaggcatggctccgaagaaggctacagtggtcattatggggctcacctttaaagaaaactgccctgatacccggaacagtaaggttgtggatatcataaatcgactgaaagagtacgagattagtcccgtcgtaactgattcttgggctgatccggaagttgccaaacatgaatatggtgtagaactgaccgcatgggaagatgtaccgaaagctgactgtgtcattgtcgctgttgggcacaatgagtaccgttccatgtccatgatgcagctgaaagagttgttcaaggcagatattgcggatgaagagaaggttctcgtagatgtaaaggctctttatcgtatggatgaattgaaggcatctggcatgaggttctggagactgtgacggttttgaattaattgcttatcctgtggaaaaagagttcaatgatgagagcagcgcttcagaggcaagtcacatatttcttgcaatgctcctgaagacagcttatttataaagagacaggggttatattatatgaacagaaagatagtgattcttggaaatgcggattcgttttggcttcaaagatacattgataacgtttccttgccattgaatcacaatgtaacattgatatcagcaacaaataatcaatatagggattattatgctaaaaagaaggtattagtaattactacgaaaccagagaagatgggaatacttggtcatagggtaaatgcattaaaaacgaccgtcaacactctaaaagaaataaaaaaggtttctcctgatattattcatgtccattatgcatacccctatattatgaggatacttcctttcgttagcaaaaaaaggaagaagattattacattttggggaagcgatttgcttagagctgataaaaaagagtataaattaataaaaaaagctgcgtgcatatcacattccttggtcgttggagcagaagatttgttttatcgtctaatagaattagaccatggttttgaagctaaaaccgaaattattcgcatgggattgacggcatttgatagtatagacgcaaaaagaaactatgctatagaaagtaaaatccatttccttgggaaagcaaatcagggcaagataataataacaattggttataatgcaagtaaagcgcaacagcatttatctgtactgaaaaaaatatccgaattatcagatgaaattaaacagaaattaatggtagttcttccactcacataccagaatgaagataaaacctaccttaatgagatagatcaagtgttgaaagattccggaattaatgggtttttattgaaagaatttatggatgatgaccatatagcagaactctgcctctctacagatatattcataaatgcccaaactacagatgcaatatcagcatcaatgttggaacatttatattcaggtagtcttgtcctgaatggtaggtggctcaaatacccttttatagatgataataatattcagtgcgtgaaatttgatgatttcaatgacatgaaaatgataattctgaagttgataaccgatgggcaaaatagttatgataagagcacagttgcgagtattgtgaaagaaaattttagctggaattcatcaagacagaaatggaagatggtctacgatagtgttcttaaataactatatgacagtaatattttgtttgtgagagattacaagtaaattgtgaggtgctatataaatgagaaatgtgaaacttgtttcagtgtttttatcatctatgatatgcgttggagttgcaattgtcatatcaatattacccatagttaaagacggcttggagttattgtttttgcttccaatctcttatgcaatagctattttcttgttttatgatatttttacacactggaatgaaaatgtggggacagcactgattgttctttctagtattcttagatatgtgatatcgccgctcctaatgagtttatcaaatcattctgtagcctatattaatgcacaaacaagctcttaccggagcgcaattttcttaatgatatatgagctgtttatggtattaatagtattgaaagtggtaagatggaagtttcttaaagccagaaatgattataatcaaaatgataacaattatgaggattcttttaaagttacttgggtaggagttgcattttgtgcgtttatcattttaattctgattatgaggggcaatttacaaaatgtcttttcacatttttcttttctaacgacgtatagtgaggatagaagtgctgtatatacatatgaccgaacttttgtttatttgctgaagtcatttgcgtttatcgcgattgcatcgaaaatgggaaaaatcgcaaaacaaaacagatcgatgaggggcttatgccttgccattgctatagtcgctgcgttagtaaatactgctttttatgatcatacttcaagatccatattggttgagtttattgttagttccttatttgtcctaatatattgcttcccgaaaaaaaagagattcttaatgacaacatttattgttgcaggtttcgcattggtttcatctgtttttctttttggaacattacagtctacatggtcgactcttcgaggaaattccaatatttttgaaagaatttctgaaatgggagaattgtatggaaatggcgtttcaaccattgcacatgcaattgacacttatccaagtgctcataacaatttaggaataggaaatttctttagcggtttatttatgaaacttgggttcataacgtttccaggatttagaaatatttactatgcgttttcaaatataccatctgcatcatcaatatttatgagtagcttgtttggaaaaggttttattcttccgccaattggcttggcattatactatggcgatatcttcttgtttgttccaatcagtatttttatctgctacatatgtatatggacattatataaaattgacagtaacaaatacaaattcaatataaattcaggaacaatatatgttgtaacatatgctgagataatttgtgggatgtcgttattcgttaataatgtttccattatgattcaagggttaacggagattccgttgctgatgttcattatgctttggattaataagctggcgaatatacttgtaattagaacgggcaaatacagataagaggtgaattaaaaatgaaaagatgcacattttgcgtaatggatgatacgtctgataagacaattagatttgacgagaatggacaatgcaattattgcaaaactgcattgcaaaagattgggaaagtttattttccaaatactcaaggagaaacaaagttaagtgtccttcttcaggaaattaaaaactatggaaaaggaaagaagtatgactgtataatgggcctttcaggtggacttgactcttcatatcttgcataccttggacataattggggtctgcgtgtattagcggttcacattaatgatggatatgatactgatatttcaaagtcaaatctccagaaactggtacaagctactggatttgattatgaagtgattactccggatgcagaacaattcaacgatcttacgcttgcttatatgaaagctggggtgcccaatattgcaataccgcaggataatgtgctgtttgcttttctgtataagaaaatgaaagagtacaaaataaagtatttcctcagcggaggtaattttgctttggagagtatccttcagcaaggaaatacttacaaatcgaatgatgttgttaatattaaagatattcatagacaatttggtacaaaacctattgataagttggaatttatatctacgttccagaaaggtgttgataacaaatttctacggattgaatccccaagacctctaaattatattgattataatcgtaagagggcatttggggaattgaaagacttttgcggctttgagtattatggcaggaaacatcttgaaaatattttcacagcttttgcgcagttatattggtttccaaagaagtttggagtagataagagaacttcacatctttcaagtatgatagtatctggacaaatgacacgagaagaagcactcaagaaattagaagagcctttatacgatcttgaaatgatggaacagtatattaccatcataaaaaagaatatggggctttcagacgaagaatttgagagaataatgttagctccgacacatcaacatacagagtatgcagttgagaattcttcaatattgtttaagatagcctatggctttcataggatgaaaaagtgatgagaacttcgtgccagttgagggctgacggaaaggggagtatcagtttatgcgattactttacgtaagttcagatgtatctgatattcatttgaacctattatcttccttagaaaaagagggcgtagagaatgtacttgcaacttattctcttagtaaaagttcgaaagatccaattcaagctactaagacatggtattacaagagcaagagcatattcaaaggtccggctttctatattgagaggcacagatccgcggcgaaatactttatcaacataatcgagaaatcacatattgatgttctgcatgcgaatatgatgtttggcgatggttttatctgccgagccatttccaaaacaatgcatgttccgtacgttctatctgttcgaaacacggatatgaatctctggttcttatggaagttgccatggataagacatgctggataccagaatttggttgaagctaaagcaattatttttctgaaccagccatataggcaagcacttttaaatcggttgccagagagaatacgagactctgtagaaacaaagtgcttagttatcccgaatgggataaatgacttttggcttaagaatcgagcagatagagagaaaaggattactgacaaaataacgtttgtgactgcgggaagaattgaagagaataaaaatcaagtggtagtggctgcggcaattaatcaatacaaaaatgtacataaaataaaagtcgagtatgtgatagttggtgattgtaataatgaagagatgctaaatcaattaaataaatatgaattcgtaagagttttgcctttccaaaacaaggaagagctcattggaacttttcagaattcagatatttatataatggcttcgcatactgaaaccttcggcctagtttatgcagaggcattgacgcaacgacttccagttatatatacaagaggtcaaggatttgataaacagtttgacgaaggtgtagttggatactcagtagatagtagagatgtggatgatatatacagaggaatagagaaaacgattgtccgttataatgaattgtctgaaaacgcatacattaaatgtactaattttacgtggggaaaaatcagtgattcgctcaaaggcatttacgaatcatcaattaattgaagaacgttcattatgcggtaaattatattcatgtgggtgagagaataacaatgattaatacagtgaaggatcggattcgcttgctggctaaaagcggatttgttcatattatttcttcgtctataattaacaaaataataacatttgcatgcggaattattctggttagaattatatcaaaagaagcgtatggagtatattcctatgcaaataacattttgggtttctttatgctagctagtggatggggggcatcctcagccgtactacaactctgcagcgaaggaaagtcagtagataaacgtcagaaattttatagatttgggtgtttctttggattgggatttaacatcctattaggcattattatcgttagcagcagttttttaattactttgccaataaagggggcgaattacttcctagccctaatgtgctttctgccatttgtacatttgatgtctgatctccagataatgtacttacgtacagaacttagaaacaaggaatacgcatatgctaatatcctttgcaccgtgctatattttatctctgttgcttgtctggcattgttgtttaaaacggaaggattaattgcggcacaatatctcgcatatttaacttcggcagtgttaattgtattgatttacaaagtgccagtatctttttctagactaaaactcagtaaacaagaaagaaaagattttttctcaatcagcggtatttctgttattaacaacggtttatcgaaattgatgtatttgctggacatttttgttcttggcattgtcgtaccagacgatactgtaatcgcttcatataaggtagcaacaaatattccaacggcattactttttattccggcctctgttgtgatctttatttatccatattttgcgcgaaataaagacaacaaaaaatgggttacggtaaatttcaagagagtgctcttttacttaggtctgttcaatgtaattcttgcattaggaatgtatgcttttgctcctgttataataaaaattatttttgggagtcaatatctcgatgcggtcggaccgtttagaatattgtgcataagctacatattttctggtacatttcgaactattagcggtaatattctcattacgcaacgtaagcttaagttcaacctctttgtctctattgtttcgagcggcttgaatactatactgaactattttatgataaaagcctatggctccattggtgcagcttgggcaacattaatcactgctgttttctgtgcacttctatctacgccctatcttatgtatacatttagtcaaatagataaagagagcgaggttgcaaaatgagtgtaaaagcaaaaattggatacgcactatatactataattggtcaaagactaccttcttcgacatcacaaattcatatcgtgggggggaagcaatcagaagattattagcatctttatttgtaaagcatattgggaaatctgttaacatagaagaccatgcagtaattagtcatgatctgacaatcggcgactattcaggcattggttctcacagtaaaattatgccgaaagttactataggtgacaatgtcatgatgggacccaattgctttatttgtacacagaatcacaaatttgatgacccttcactccccatgattatgcaaggatttagcgactacgaacctgttgttatcggtagtgatgtttggatcggacagaatgtgattatacttccaggtgtaaatatagggagtggatcaattataggtgcaggggctgtagttacaaagtcttttcctgagtacagtattatcggtgggaacccggcaaaactgattcgtgctcgcaagcaggaataagtgcggggatatttcgaaattcaaaggctgaagtagagaattcattatactatatttgtagtgatattcttgttcttcatgctttcgtctactgtcatcgctctactgtccaaatttaaaaccagtcgcaacatgataaggtctttgtcattgattgagcgcaagtataataatgataaagcttgttttatattggcaggaattgatgaaaagtccctgctggaggctgtagatacagtggtacagatgaatctggaagaacattttttgataaatgcgttaagaacgattagattgtaatgtaaataaggagcaccaatattgtcaagaacaaaaaaggaaccggattataattcagatgaagtgatacaggaattgataatgtcactggcaaaagcctatgaacacacgccttctttgcgcactcttgccaatgagtttaatatgactcttttgaaaacgagaaaattactaattacggcaggtgttttttcttctgaaatctctgaaatcgtaaatacactgaagaaagaaggaaaaagtattgaagaaattatagatatcacaggacttagccgtgcgtcagtacattcttatttaccatatagcaaaactgtttacaacacaaatgaacggactcttgctgcggaacgggtgaaaacgtaccgtgaacggaaagcagcagcagaaagactcatctcattggaaaatgaagaggcttcccaatacaaagaacttttgtggaatgcaatcgcgaaatttgaaaattatccattttctacggccaaaggcctaagatttaaatatacggtaaaaggcaatgaaatgtttgtaaaccgcaaagagaagtcgattaccagggcgaccgtgaacctggcatttgagaaggttttggagcttcagggagttgtgactggtccaaagaaactaggcgtatttggagcaagttacctctatcaggtatttgttaaactaggcgtgatagcagtacaaaagaaagaataaagaagttgtaggtagagccgcttattgtagagtctatatataatataaatttgacaaaaccagcataggaagataaacttaaatgtgccgatagaattgagcagcctcaactctataccagcaaaagactgtaccttccaagagtctaaactacatttatggagaacaaaaagtgaacaataattcaaacaaaaaactaatcaagaaacaagtcgactggatgataacccttgtccccttcctgcttatcgtggtattgtgtattctattcttttttatgccggaccaatctaacgccgtattgagccaaatccgatatttcttcggaaataccttcggaacctattacctaatcataggactcggcatttttctagtttccatctacgtggccgtgtcaaaatacggtgacatagttctgggagatccgggagaaaaacctaagtattccttcttcgcatggggttccatgatgtttacctgcggtcttgctgcggacatcctgttctattccttttcagaatggttcatgtatgcagcggatccacatatcgcagagatgggaagtattcaggactgggccagtgtgtaccccatatttcattggagtctgatcccctggggcttttatctggtacttgccgttgcttttgggtttatgcttcatgtaagaaagagaaagcgtcagaaatattctgaggcatgccgcccggtgcttggaaaacataccgatggcatagccggccgtctcatagaccttttggcggttatcgccctgcttgccggtacggcaaccacatttagtgtggcaaccccgctgatggttgacatcattaacagtctgtttggaatccaactcaaccgctccgttgtgacagccgttatacttgtcattacctgcttcatttatacatattcattgcttcacggctttaagggaatcagcattctggcaaaggcatgtatttacctgttctttggtcttctggcatacgtcctgtttttcggcggggagaccagatatatcatagagaccggattttcttccctgggaaggatggttcaaaacttcttcgaattggcaacagcaaccgatccccagaggacaacctcctttccgcaaaactggaccatttattactgggcgtactggatggtatggtgtgtggccgcccccttctttatcggcaatatttccaggggccgtaccgtaagacagaccattttaggcgggtacgtttttggtgtaggttctacgctcatgagctttattatcctgggcaactattctttgggaaaacagatgaatggagctgcggatttcctgacaaaatataaggagacaggagatgcctacggattgattacggatattatcgggaccatgccctgtgcacccctggtattagtggtagtcttggtaaccatgatcgctttctatgctacctcatttgactctattgcgctgacggcatcttgctacagttatcacgttttggaggaaggggaacagccccacagaggaatccagctgatgtggtgtattttattgattttgcttcccattgcacttatatttgcggaaagctccatgagcaacctgcagtctgtgagcatagtttctgcgtttcctattggttttataatggtgctgattgtgtggagctttttaaaagacgcgaaaaagtatataaatgggaaaaagtagctgaccggcatacgcagcaaagaataaaggagcagctaattggacgtatatcagattttaattacacataacagaccgtggacggcccgggaaatgctctgtgtcgccctgctgctggcagttgctttgtttgcggcaggttatctgctccggcatcaaaagataaagccctcccaggcgctggccggaatatctctggtgctcttcctttccgttgtattcggctccaccgtatttaccaggatgccttcgttacggcagtttgagctgcagcccttctggtcctggagggaagtaatcgtataccataacagggaactgctgaaagaaaatctgctgaactgtattttacttgttccgatgggaatactacttcccatcctcttacatcgaaaagtgacatggcagcaggggctgctgtggggacttctggtatctgcggcaattgaaacctcccagctggtattttgcaggggtttgttcgaatgggacgatatgattcataatgcattggggtgcatggcaggctgtttgcttacgaataccgtgagcagacgcaagacctagtggacttatttacttagatatgataaaatccctttgtggcaattgtcctttaaaccctgcattttagggggactttggaacactatggaaagaagaaggagcataacaaataatgaaaaagtctgttattttaattttgatgggatgtcttatcataaccgccggcgtagcctacttagtatatacaacagacagagatggccctgtaatacagatggacgagtcaactgaccttacctacaccgaaggccaggacaaagaggaacttttaaaaggagtaacagccattgacaaaaaggacggggatgtttctgacaccctgatggtagaaagcgtggtacccgccctttcaggagataaggcaacggttacctttgttgccgttgacaaacacaataatgtaaccaaatatcaatgtgaaatcaactaccagggtgccgccggtgcagagaataatgacactgaagcaccccgggaagatcagaatacagagacgccggatacggaagaggagactccggaagctcaggagacgggcggtgctccggaagcccaggatacgaccggggatgagacggaagctgccatctctcagcttccggaaggaagtcctgccttccggctgacagaacaccagataacactgaaaaaaggaacaaagtttaactacatggactacatccgggagatcaccgacgataaggactcaagagaagacctgtaccgtaaaattcgtgtgagcggggaggttaagacctcccaggccggaacttacgaggtatcctactccgtgacagacagtgacggacatcagtccaatgtagagaagcttcaggtaactgttgaatagaacgcgggattctgcaggacagagtacagatgaggggaatgaatattgttgattgatgtacataaccatatcttaccaggcatagatgacggtgcaggtgatataatggagtctcggaagatgcttgacatcgctgtgggtgagaagatagatgccatcctgaccaccccgcattttgagtgcggcatggaccaggcagttatagaaaaaagagcggcagcttttgagagcctctcccaatatattcagaaagcaaagctgccggtcgccttatatcccggcaatgagttgttttacagtgaggggatcatagaggccctggactcgggggatgcccttaccttgaatcacacgcggtatgtgctggtggaatttccagtctatgaagagttcagttatatccggagggcggtccagaagctccgctatgccggttatctgccggtgctggcacatgtagaacgctatgaaaacctgctgaaggaagaaaagattgcagagatcgttaatataggcgcttatatccaggtcaatgcatccagtttgaccggacgggccgggtggcagatgcggcgctttcttctgcggctggcgcgccgtgacctgattcattttataggaaccgacgcccatggatgggagcacaggcggccgaagatgcaggagtgccttgcttatctggaaaaaaaggccgggaaagactgtgtgagaagtattaccagagataatcctgaaaaattactgagaggagaaaatatcagtggagaagttagaaattagagatgatgtggagctgagcaaccgggagaaagaggtctaccgtaccctcagaaccaatctggagttcaccggggtggagaaccgggccatagcggttacaagctgcacacccaacgacggaaaatccgtggtgtcctataacctttctcttgctctggcagagagcggaaagaatacgttatttgtggatgcggatcttaggaaatccgttctggttcacagacttaatttgaagaatccctccaaaggactcagccatctgctgtccggacaggcgggagccaatgatgtgatctattccaccaacaagaaaaatttatttatgattccctcagggatctttcccagcaatcccacggagctcttgagcaatggcagattcgaaaaactggtggcggggcttaagggtacctttgattacatagttgtagacacaccgcctcttggaagtgtcatcgacgcggcagtgattgccaagatatgcgacggttccgtccttgtcctggcagcggacaaatcctccaggaatgaggctaaaagtgtggtgggccagctgaaggctgccaacagcaatgtcctgggcgttgtcctgaataaagtagattataagggcaatggatattatggaaagaaatacggcggttactatggaaagtacacaagctattactaaaagagaaaacgtgaaatacattccaaaaggggaacaagatgaacaagaacagagaatttgaagatgaaattgaaattgacctgggtgcccttctccatatcctgctgcggaaatggtggctcatcgcaatatgtgcatttatggggggcatcattgctcttggtatcaccgcagggttgctgacgcctaaataccagtccaatgccctgctctatatactgaacaaaaccaccagcgtgacttccctggcggatattcagattggtacagagcttaccgccgattttgaggtgattgcaactagtaaaccagtgatcgatgctgcaatcgagcggatcaaagaggaagaggggaaaacctttacgagaaaggatattttggagatgattcaggtgagcaacaagacagggactcgtattctgataatctctgcaacctcagtcaatccccaggatgcctgcattgtagccaatgcggtggccggagagacagctgaccggatggctgacattatgaaagcagatccccccactacggtagaacctgcagaggtttctgagaagccggtgagccccagcatgaagaagaatacagccattggctttttggtaggtattgtcctggtatgcgcagtccttgttatccgctttatgctgaatgacaacattcagacagaagaagacgttgagaaatatctcggtcttcctacattggcaactataccttatgtaaagagcagagaaaaggaaaaagccgggaagcagcgcgcgctgaaggaacataagaaagaggcattgagtgaaaagaaacaataaattattctgggtattttttgtaatctttctgggagctgtctgtttcggaatatattattacaccagccagcagaaaaaagaagctgtgtatgagaaaatggcagagcagaaccaggtgaaagaggagccggaacaagaggaagaacctccaaaagtggaaactccgcctcctgcggaggaagaaaagccggagattcccattgattttccagggctgcagagtacgaatcctgagatctatgcctggatccgtattccggataccgaagtagactatcctgtggttcagcggccggaggatgacacctactacctgaatcataccgtggagggggcagaggggcttccgggttctatattcacagaatctctgaacaaaagggactttaccgaccctaacaccgtgatctacggccacgatatgcgggacggcacgatgttcggacatctgaagaaatacatggacagtacgtacatggaagagcatccgctgatctatatatacacaccggagcacatttacacctatcaggtatttgcagcggtgacctatgacaacagacatattctgagaagctttgactttacccaggagacgcagttccaggaatttctggattccctccgggatgcccggagcatggccagctatgtgagggatgacatttccgtaagtgcagagaaccggattttgacgctgtccacctgcaatgggaatgcgcagcagaggtttcttgtggaggcggtgctgacagatgaacagtaaaaagaaaaaaacagtgattttgactatacttattcttatccttctgctgatcataggcggcctgatcttctggctggccggaaggatggaagagaagagagatgcagtatccggtgaagatactgccgggaccactgccccggtaagcgcagatgctgtgtattatcaggggcaggagtaccggtataaccgtgatatagaaaatattttatttatgggggtggataaaaaggaacagattgtgctccaggatactccggggaaggccggccaggcggacagtgttatgatcttgtcattgaataaaaaggacaagacggccaggattctccagttatccagagattccatgacggatgttgatatctacgatgccaacgggaattactataccacagttcaggcgcagttagccactcagtatgcctacggcaacgggggacagagcagctgctatgcaatgaaaaaaacagtatctgagctgctgtatgatctgcccattgacggctatatttccctgaacatagaggctatcagtaccatcaacgatgctgtgggcggtgtgaccattactgttccaaaagattatacgagaattgatcctgccttcacagaggggagcaccatcactctcactggtgaacaggcagaaaagtatgtccgctatcgggatacgaacgaagaaggcagcaacaatgagcgcatggagcgccaggtacagtatctgcccgcactaatatcagctctgaaaggaaaagcaggcaaggccggggattactatgataccttttaccccctggtgtcctcttatatggtgacagacctgagtgcggaccagatcaaccagctgtcggaatatcagcttctctacgatgagacggagtatgtacccggggaggtccgcagcggggaagagcatgaagaatacatcatcgacgaggcaaaattaaaggatttattgatggaaatgttttacaaagtggaccaatagtgttataatgaactcatgtttcaagtgaggagtaaaagacaggaggataaaagtaatgaaaaaaatgattgctttattaagcgcagcagtgctgactgtagcaactgcggtaactgcgttcgctttacctagtgtaagcgtaagcggtgtagtaaccaagattgagagtgctgttgatgccagcggcaatgcggttacagttgagatcaaagacgttccggaagaatataaagcagcagtagaagaagtgaaaaaagtggaaaccattaaagaacttctcggcgctgattttaaagaaggaatgcaggtagtagatgtgaaagaagttagtgttccggagggaacagcttttccggtaacgattaccttttcagtacctggcgtgaaagagggaacagcggttgcagttcttcactataatggatctgcctgggaaagaattacaaaggatgtaaaagccggtaatggtacgatttccgctacattcgattctttatccccagtagctttcgtagtagacaaagaagcggcagaagcagcaagctcttctgctacatctccaaagaccggagaattcaatgttctcggaatggctggtatcgtagctgttatcgcattgggcggaatggctgttacttattcaaggaagagaaaagaagcataagaaggtaaggatataagcccggagatttccgggctttttcttttagtatcctaatgataaacatacgagggaggatttatcatgaaaaagactgcgaaaaggctgattgcctgtgtaactgcgtttactgttttcctgagccagccgattagcctcagggcggcaaatgaagggaaaccgtcagatacaggggtgagggagcttgactacaggacaagggtttctcacagcggaagcggcgtaaatgccgcccacggaatcgtgaaaaaggataacagtctctggacctgggggccgaataactgggggcagctgggcaatgggtctttcagcgatgtatccaccccggaaaaggtcatggacgatgtggtgtccgcagtgatttcacataccaatggcctggcggtaaaggaagatgacagcctgtggatgtggggaaacaatcagagcggtacgcttgggattgaatcgccctacgggaatcacgcggaacctgtacaggtgatggatgaggtggcgcaggcatctacggggaatctaatgtcttttgcagtgaaaaaggacggcagcctgtggttctggggagccaatgacaatgggatatttgtggaaaaggagattacggaggagaaaaaaatataccacccggtgaagctgctggacaatgtgcagaaagcagtcatgggaagcggcaactttgcggctataacaaccgatgggactttgctgatctggggaaggaatgacatggggcagcttctggacgggactacagaggacagcccggtaccaagccctgtgatggatggggtggccgacgtgagtgtgggagaaaacgggacgtttgctgtattgaagaccgacgggacattgtggttctggggagaaaacgggggcaagttcggaaacggaaccagagagaattccacagagccggttatggtaatggaagacgtgaagatggcggacacttttggaaccggtttttctgctgtggtgaaaactgacggtaccctgtggacaaccggaggggacagttggggcgcccttggaaatggaacggagggaagcaccacagaatttgttaaaatcatggatgaggtggaatgcgtaaagctctcggacttctcctttgcggtgaaaaaggacggaagtgtctgggtctggggatttaacgaatacagtaagaatatggacggcgctccagaggccattgagacgcctctaaagtatatggagccggggaccatgctggacaggccggatcccaccatttctgacacccagccgtcccgggagatcacagatctggagctgtttacagaatacccccagtatctgagcaatacttccgtttctcaggtggagcagttcatgtgggacgctacagccggcgccctggatgaagtgtacaagcataattttctgtcttcataccagtacgcgctgaaggaagggggcactagcattctgctggaggagcatctgggaatactgtgcgatatacttggtctgccatacagcccctatgaacggctatacgataagcttctcaaggaacagacccaggaatttatcagtgacctgtcagagaaggaacgctattttgacagcctgaagagccaaacgggggaagtgctgaaggaactgaagggtttgaacgccatcctggaggcaggagataccattaatgtggagctttgggcggatgcgctccatcaggcagtcccggatctctcaaagaagaagtgcatctctttgctgaagcagtgtgaaagtgatttcggaaaaatcagcaaggacttaaagaagctgaattcggccctgtctgtgggagatattttagtgacaggcattcttctccttgagacggataagacgctgattggtgaattaaaggaagaatgcagacagtatggcatccagtcggagctgtaccggggactggatcttctggaaaaggagatcagcctcaatgagaacacacccgcagcattctttctggagaagttcttttccggcaaagccttagggtggatctccggtcatgcagatgaaaaactgctaaatttggtcagccgcttctggaaaagcggaagcgccggtgaagaggcggtaactatggtggcacagctggttgtggcgggaaccgcagagattatgggccttatgcttcccaatgcggataagaccataaaagccacaatacagcgttcttttactgactgtatacgcgccaggctgattaccggacagcagattacgtttctggaatacaaaaatcagggcgtgtgtccggatgacatagaggatcagatagaaaaatataaaatcctctacgggacgtacctgaagtctctgcagcgggacattacactgacacaaaagctggtagacaaacctggctatacccgcaccaaacagagactgaaagatgcccagaccatatacgataaatatagtgtagagaaatatctggaaatgtgcaaagcccagattctgagggatgaggcaacgaatctgaaggggataccaaacggggacggaacatttacagtgactggatatgcgctggaggagacgcccaagcacctggtcattccccatgaggttctgggatatccggtgagccggattgcagacaatgcgtttttgggggataccaatatacagacactggtgatcgaggcggagggaatagccgtaggatcccaggctttccggggatgcacgaatctgacagaggtttatataggaagcggggtgcataccgtggaggcgtctgctttcgcggactgtaccggtcttgccgtcctctctatgggggaaggaatcagggagatcggggaggaagcatttgctaactgtgtcagtctgggccaggcagagatcccctattccgcagctacggtgggtgcccgggcttttgcgggctgtacggcgctggagggaatgggaattctctcggaaaatgccgtattcggggaacaatgctttgagaatgctccccttgcagaagtcgccggagttgctggaacctcaggggaggtgctcgcagaagaaatcggatctgctttcgtgcccaaagaacccaaggtggagagtatatcggtaagcaaactgccggataagctggaataccgcctgtttgacgatgctgacaccgccggaatggagcttacggtgcggtatggcagcggagcttctgctgtgattcgggagggatggaccgctgccgtgactgggcggacgattggagaaagctccgtgcaggtgttttatggagatcaaaatacgtcttatcctatcacaatcctccccgataaagtgtcctatactgtgcactatgtagatgaaaacggcaggtttatcagtccttccgtcatcagagaagggacggcaggtgagaccgtgagggaagcggcaatcgcaatccagggatatgaggcagatgtgcctgaggcagagttcacactgggtatctataataatgaactgcatctcacctatcatgagagagaaattaaggagttgagcacagcgtctgtcacgtctctggagaaagcagtctatacgggaaaagagataaagccctctgtaacggtaaaagacgaagagggaaatattctgatcgagggaacagactatacgctctcttacagagacaacaagaacccgggaaccggaaagattgtgattacaggaaagggcagctggacagggactgtgatgaaagaatttgtcatctatatctctgggacttggcggtcagacgccaggggatggtggtatgcctatgcccacggcggttatccaaaaagcaagtgggaactgattgagggaagatggtattatttcgatgagggagggtaccgtatgactggatggatccggccgtcaggaacctggtactatctgaattcggagggtatcatgcagacgggctgggtgaaatccggaaacacctggtactatctgaacagaagcggagcgatgcagatcggctgggtgaaagatggaaacacctggttctatctaaacggaagcggggcgatgcagaccggctgggcgaggatcggaggaacctggtattacctgaatgggagcggagccatgcagaccggctggacgaagatcggaggaacctggtattatctgaacggaagcggagccatgcagaccggatggatgctggacggaaagacctggtattacctgaatggaagcggagccatgcagacgggctggctgaagacaggaggaacctggtattacctgagcggaagcggggcgatgcagactgggtggcagaggaacggaggaacttggtattacctgaatggaagcggggcgatgcagaagggctgggtgctggacggaaagacctggtattacctgagcggaagcggagcgatgcagaccggctggttgaagattggaagagactggtattactttaacggaggaggagccatggcagttaacacctgggtaggtaactcttatgtaggggcagatggccgctgggttagataactgatagaaagagagattcttatgctgcaaattgccatttgtgatgacgaaaaattttacagagaccgaatccagacacttctggcagggtatctggaaaagcggcagctggagtataccatcacccggtttttctccggggaggatttcctgagccgcggggaaaatattgtacaatatgacattgtttttctggacattagtatgaatgccattgacggcatagagacggctctgcagattcgcgcctttcagtcccggacagaaattgtgtttgtcacagcatttatcaactatgtcctggaaggctataaagtaaatgctgtgcggtatattctgaaagataccctggacactgcagtggaggaatgtatggatgccatactgagaaagcggcagctgcggcaggtatccttctcctttctggagggggaacagaggctgtacacggacaatattttatatattgagagcaggaagcacaaagcagtctttttctgtctggaatcaaagctgataaatcttaccatttacgacaagctggatcacatagaaaagaagctggagggacatgggtttctgcggatccacaagagttatttggtgaatatgaagcacatccaaagaatcagcaattacaaagccgagctggatgtgggaggagagctttccgtaccccgccgcagataccaggcggtaaaagaggcgtttgtggcttataagggggcattgtgatgggaactgtgctgagaagccttggattatccctgctgatggggctgtgctgcaagatttactttgagacactgacgaagaggcacagaccgaaggtgaaatggctcggcagcacaagcctgctggggttcacactggggtttctggtgatttcatttacccggattcctcccttcattcttcagcctgtgcgtctgatactgattgtctttatagtggcacagatctattatcagctcaggattctgcagaattttgtactgacggtactgctctgtgcagttttctggatgacggagatattcaccggggcggtgctctatgctctgccctggggacatgtgatcccggagcagatgatagagcctttggccataggggttctggttttccttacgcttttgtttcatttccgctgcaggaggagaagccggcttcgctcagacgctggatggattcgtttcggatatctgccagtatgctgcatggtagtggctgtggctctcagtatggtgctctgggacagcagcgcagtgaatgccgcggcaagacttgtagtaattatggggtttggggtgttttttgcaatttccctgtactttacaggagatatcctggaaaaggaagaggagatgcagaacctgcggctttcccaggagcggaccaggaaccagatggctgtgtatcagaacatgcgaagaagctatgagcagcagagaaaattcctccacgactataaaaaccagctcacctgcatacaggggctgctggcagagggaaaggaagaggagactgccggctatgtggcaaagctggcgggaagccttaagaagagcgcagatacggtaaatgccaatcacacggtggtaaatgtagtgttaaaccaaaaataccggtacgcagaggaaaagggcattgccatggttttggcagtaaacgatctttccggactgacgatggaggatgaggacctggttactctgctggtaaacctgctggacaacgccatagaggcatgtgaaaaactggaaggcggaaaaaaggtgatacagtttaagatgatacaggaagaggaacagctgatcctttccgtccgaaacccggtaaaagagcctgtggagataaggggaaataaggtggtgaattccggaaaacaaggacccggacatggaatcgggctgcttaatgtggaagaagtgataaagaaaaatcatggaacaagtacactgcagtgcagggacggatggttttatttcgcggccatgtttcctgtgcagcagtaatgccgtctgtctgccgaaaggaggcgcctttttttgctttctgaccgtctaatggtgctctccctgttgaatcctcacaggggactgggtactatgggagttagaacaaagagcagcagaggaggataacgcccatgaaaaaagcagccggcagaggaatactgaccattgtgattttgtccctgtgtatgactgcctgcggaggaacaggcggtgtgacaaaggccgggactcctgcagatgcagtggaaaatgtcctggtggcagtaaaggagctggatttcaaaacatgtaaccaatattcggacaattatgtaaaaacctataaaaattggctggggattcccacagaacgggaataccggatatttaacgagctgcagcagccggggatgaaaaaagggaaaaaatacaaggccaataagcggtttgcagaagaggttgtcaaaaacctgtcctggaatctgggtgaggtgcgaaggcagggcgataaagcagagattgatttggagatcaccaatacggatatgacggacgttatggggcattacacgattcacataatggaggatatgatcaaagttgacggaaccggactggggcagctggtacgcagtctgtccgagttagactatgacaaaggcagggtccttacttatctggagcaggcagaaggaacccgtacggaagtggtcactgccaccctttatcagaaagacgggggatggaagctccatctggatgagcctttgatccgtgccgtgatgggaaacctgaatgcagagaagtattcgcaagaggtagaagagaggctggaacatctggaagcagagtacgagaggaagatggaacagtggggagaggaaatattatttccccacaaatagcgtacctgcgtttacgcctttgacaatatcgtatatcgactgcggtcttttgccattggtaattatggtatcaatgccctgagctgtggcaagagacgcagcctgcagctttgtgcgcataccgcctgtaccccggcgggaaccagcgctgcctgcaagacaatatacggtttcgtcaatctgctcgatccggtttatcagctttgcatttgggtaaaggcggggatctgcgtcgtacagaccatttatatcggataatataatcagctgttttgcccggcatagaaccgcaacaacagcggaaagcatatcattgtccccaaacaatctttcggcggactcaatttccgtatagcttacggagtcgttttcattcacaacggggataattcccatttcaagaagcgcattaaaggtatttgtcaggttttcttttttttcttcctgttcaatatcctccgcatttagcagaatttgggcgattgttttatcataatccccaaagaatttgtcatacagatgcataatgctgcactgacctactgcggctgccgcctgtttcatccgcatgctggaaggatgttctttcatttttagcttatttgttccaaccgcaattgcgccggaagataccaaaattacttcatagcccatattttgaatatcagacaggacacatgcgagccggtcaaaggaacgcagatcgcttttccccatttcatttgtaagagtggaagtccccacttttatcacgattctgttttggtaaagtcccatatcacacactcctgcttgactttattttgtttacagtctaccatgtattacataattacaaaagcgaatgtttatcatgggaatcataataaaatcagataatagaaacagggtgatacatatggatatgaatattcaaaaatacatggcgtttgttaaaaccgttgagtacggcagttttacaaaagctgctgagcgtttgaactattcccaatctggcattagccgtatgattaacgacttggaaaaagagtggaaactcgttttgctggagagaggaaaatttggtgtaaagctgacgagcgacggtatgaagctgcttccccatgcggaaaatgtatgcagggagtatgagaagctccaaatggaagtgaatgaactaaacggtctgcaatcagggcttatccgtatcggcacgctttccagtgtagcggcacactggcttcccaacattatcagagaatttcaaaaggcgtacccgaacattgattatgaactgctgcttggagattatacggaaattgaagaatggatattagacggacgtgtggactgcggcttcctgcgtttgccaacttgccctgaatttgaaacgatttttttagagcaggacagactgctcgctatattgccggaacagcacccattggcacaccttgaaaagtttccagtcgtggcgctctgtgacgaaccatttatgcttttggagaagggcgccaaagcggaggtctcagaaatatttgaacgctgtaacttgacacctaaagtacattttaccacatgggatgactacgcgataatgtcaatggtggaaagcggtcttggcatcagtattttgccggaattgattttgaagcgggttccttatgggattattgcaaaggaattagacgttcctgcgtaccgaaatatcggtatcgccctgcggagtaagaaaaaagcatctctttcagtaaaacggtttttagactatcttcaatatcgctaagttttcagaaatatggcaagtccctgtactacggcggatgaatggacacttcagatatgaggtgtcttttcttatatttgtaaacgctcacctttatgcgaagggtcacagatcggtgttgaatttagtggatggaattttttacaatattttgtataaaattccacgaccaggatatgaacgatatacgtacgacagctcatacctccggctggattagattatatatatttacatattattacatgtgtcggaaatgataatatgtagaaatagattttggaggaatatatatgcagcgtatcacaaatcatgaattatctgtgtatgagaaatgcctgagacaagaggagaaaagccaggcgactcttgaaaaatatatgcgggatatccgacattttcttgcatatttggaggatcgtaccgtcagcaaggaggagactattgcatacaaagaatatctggcacagaactatgccccggtaagtgtgaattctatgctggtggcagtaaacggatttctgcgattcgtcggtctgcagaaatgctgcgtcaggcttatgaaaatccagaggcagattttctgccgggaggataaggaacttacccgtcaggaatataagcgtttggtgcaggcggcagcgggtacccagacctcctatgtactgcagacaatctgcgggacgggaatccgtgtttcagagctgcagtacatcacggcagaagcagtgtaccagggaaaggctgtggtaaattgcaagaataagacacggatcattttcattccaggacctctgcaaaagctgctgaaggagtatttgaaaaaaacaggtcttcaaagcgggccggtatttttagggaaaaataaaaaacccctggacaggagttatatttggagaaagatgaaagaattgtgcaaaacagcggaggtggcgccggaaaaggtcttcccccataatctcagacacctttttgcaagagtcttctacagcatagagaaagatatcgttcgtctggcggatttgcttggacacagcagcatcaataccacaagaatctataccatggagaccggggatcagcatatcagccgtatggaacaggtacaaaagatactgttcacaacataatattcattatgtgacctattcgggtatgccagcctggtaaaacggcccggatagttttgcattcatgccgtaaaacattaaaaaaaggcacataaacaaagccgacagaagcatgcttcaccatcggcttgtttatgctgcctttttcaaaaaatctctctaaatcgcctgttttctcttgagaaaaaaggcgtttggtgctattatatagtatgaattaatcctatgtgacacaatatttatgtacaagtcggcgaggatgtcacataatgaatattatgtaatacctgaaggagcaaaccacagtaaagccctcctgtaccggctggggaggaacacaaagagcggagcatgaagcggcagcggatatgggaaagagaacgtatcaaagacaacagtgggaagagtggtatcagaacgccagggagtatttcgatgcttttgggaatctgctggttcctcatgactatgtgacggcagacggctatcgtctgggacgctggattgaacggcagagagccatgcataatggagtgctgccgtcctccctggaccgggaacgctgccttgcactggagcgcattggcatggtgtggaaactggagaaacggtttccgtgggagacgtggatggctatggtgcaggaatatcatcaggaatacggggacctggatgtacccacagattatattacaaaaagcggatgtcagctgggatattggatcaaagagcagcggaaaaagtacaaagggggggatttggcagagaagcagataagggatctggagcgctttggcatgacttggggcttttacgagcgaaaagtctgggaggactggttccggctggcagagatgtattaccagaaatatgggaacctgctggttccggcttcctatcaaacagctgggggagaccggctgggaagctggatctttgtacagcgtgagcggtatcggggcgtaaatggccgcaggcctctgtcccgggagcaagtaaaagctctggaagggatttccatggtttgggatcttggctgtgtacgggatgaaaattggaatgccatggttcggtggatagaggaatacaaaaatcagtatggccgtctgccccttagagcctccgtgaaggcgccggacggacgaagcatgggaaactggatttctcttcagaggacggcgctcagcaagggtaaggtggcagaggacagaaaaacgcgattggcggatctgggaatctatccctttggcagtacgaagatgcccttatagcttttggggaacctttagcagcccggccctggattctcctctttggatgcaggcgctgcgtatggtttgaaacaggtacatatacccttcataaagatccctaaggcaggcttcccgatctcccttttgcagagaaagaaatgcgcgctccccgagcttatttaatttcttcatacttggactggatccggcgtaaaaagaataaaaatacccccaatttaaaatgtctgtgacttcccctaaaattatcttcagcgggtataagggtacacggggaagcaggcagtccatccattccttcagacagctcttgggagaatgggcaagacgctcctgcagttcctgctccaaagacatgtcatactggtcaaagaccaaagccgcggcagggcggatgaggaaggtgatgagctgcaggccgcacaaaaacataaaggtatcctgccggtggttggggtgccgggacctttggtggatgtgccatttttcatgggagagcaccagacttcctctgccgttgatgatttcgataaaacccagagactgaaggaccttcaaggttttgcgtatggtggacaaagacacctggtactcttccatcagtctggcctgggacggaagcagcgttccctgagaatatatgcccataccaattttttctaccagatccctgccgatttttttatagagagaatcccagccccatcctgcattccaggtgaaacggggttccccatcgtccctgatatccggatgcagatccatcagcagatcaaaggatttttctgcagtttgaagggctgtgcggtagtatgaggcaaagctgcgctgcaccgtataactgtcggactgcagacaatctaatatccagtctgcgtgatgtgactcagtatatggagtatatccggtaataaggccctggtattctgccagaaaaggtacttccccgtagagctccagggatgcgtaaaagctgctgaaaagaaagttgccggaggagagaagtacgtcatgtattatattcgagcatatctgccagctgccggtgagcctgggccgtttgctccatttaacagccttttcataatttggcagttcatagatgctgactgatttggcacagaaggcgaggatctcaggcatgaggagctccatagtccggtatacgtctaagatggccgtgcgctttctggcaatggatcggacagaggcgttttcctttttcataaacggcgcctggtagataacaacggcccgctgcctctcccgggtacggatcaggccatccctctggagaagcttcaggacggtttttatggttttagcgcccacgcgatgctgtttggcaagctggcggacggaaggaagctggctgccgtattccagctgactgtttagaatctgctctcttaggatcgtatagacgatctcgtataagtgtagttttgactgcaaagggtcacctccgttggcttgataagttgggcttgtaagattagtattccccggatgggcgttttgcagaatgaatccatgtctgccttgcaacagacatcataacataaccagaagaaagcagcagaaaaaagaattagggagtgatattgttggacaatttgttagaaaggtgcagccgaaaggccggatgcgggagagaacaggcggagcagataattgctttatttttaagtgaaattgtggaggaactggcccagggacataaggttgacctggggccggagttcggtgtattcagcgtaaaactgcgcaccggagctgcagcggagggttccccgaggacacccaaagacagccgctataaagttattttcagggaaaacagcggaacgagaaagcagctaaagataaagctgccggaagagaaatgatttgccaggaggatggggaatggagaaaaaagaaagaacactggaacttttggaagtgattgcagggagagtgggatgcggcttcctgtcagatttgcaccagtcttgggaactgccctatgtccagcatgtaatccgtggaatggatgtgcaggaatatgatttgccggaatggacggacgcagtgaagtacattacaggagagataagggagtttgaaactgcagagcaggcggcggaatatcttcgggagtatactccgtataagagataaccgccctttattcgggcggttctggctatgaaactttcttgttatcggtcttgtcagcgatttcctcctcctgggcctctgcacactgggaagcagccttttcttcctgatcaaattttgcccacaggatatggtagataatggagatgatcataataatgccaagctccagcaatgcgaaggggctttggagaaactggacatacttgcccgcgtaggggatatggaacacataggtgcccaggagatcttcccggtaggttgcgtagtcgtcgtagcggtcagcgttctccgcctgggtgtagtaccgctctctgccggtgtcgtctatttcctttttcttaaaatagtgggtgaacacagcgtccttgcccagtcggttgacatgaaaggagataatggtatccggagggatctcctgattcttatcaatagttttatccaaaaccagggagcccacgggtatagtaggctccatactgtcggtgagaaccacaaaggtctggtagccgataaaatcctttaattggtttgggaaaaagtgcattcccactatgtagaggataagcagagcggcaagtatgccgaatgcggtattccatatgtgtttgagggcctttttcatgtcagatctcctaatgaatgcgctgtctgcattgtattacgtggttgaaagaaaaaataccatcatcagatggtatttctctatgcatatgaacaatttaaaggtctgcttacactcctgagccggcgcttaatgttccggttacttcaacacttaatgtcttgccggctgttgcagcctccagtaccttggtataatttgggttactgtcctgtgcattaggcgtaagtactaccgtataagcattttcaccctctgtgacagttttatcaattccgcctgctaattcagcatcagccttctttaaagtaattgtaaatgcatctgcaacgtcagtttctgtggagtcaccatctattgtgacttttgtttctaatgctaattgtggatttgagaccacaccggtccccatgcttacatcgaattttaaattgtctgccgtataggtattggcagttttcaacgtacgggttccagccgtaaatgtaacatcttccgcacctgctgttacggtaacaggcttatctaatgttaaactggcattcttcgatgcgctgagagtatcccacactgcgaaagatccaaccgtcgttacaacaattgctgcggctgtcaaaatacctaataactgtttttttgctaattttttaaacatatgtagtcctcctagacattctttttttacctgtctttattatactggaggaatttggttttgaataatgcttctttctcatgtctcagcgataaatcggggttatcacagatccctagggagcatctccgtaattatcctgaatgatctccaggaattcttccgcctgttttgacaagatttctttttttcgtttcacccagagaagtttcttttccatatcttcgcagtaatccagaaggatactggcgatatgccctttcccaagttcttcgatctgccactttccaccgaagataaatgcatctgtgcgtttaattagattgacgatcccgtgataattattaataacaattgttttctcaaaatcacttaaccggatctcacccagtgagataagctggttaatattagcgaagtagtcagccggcaggtgtacataggtaaaggggagaagagcctttggatccatatgcgatgcctgataaaaagggttctgggtccctacgtgaacgtagtaagggctggaggcaatttcatgcagctccagttctttgatatcgcagattttctttagtattgccagctgtttggtattcacgacgacaatccccacctctgacgtcaggccggctacatgctccaggacccgttctacggatgtctcatgtatggatatattcgcatgtctggtctgcagattctgataaaaatgcagcattatttcatccttcagtacgatgtttccaacagaaacagccattttattctgctcaaattccttatctttcatcttcaaagattctatttcattcatctggcttatcacggaatgggcataaaaataaagactttccccgattgtggtcagggtaactccgtgatttgagcggacaaatagcttagtgcccatctcgtcctccaggctctgcatggcccgtgtcagattaggctgtgtgacatagagccggtcagctgcttttctcatgcttttttgttctgctatctcaacaaaatattttaaaaattttaactccattggtattctccggtacgcctttagagggacaggcatattctatttttatttaaggtgtgcctgagacacacatgtatctattctacctttttattagaggataagcaagtaatttggttatttaggcctgccagggacgattacttcttcccggcgtccagcgtggccagaaacaggggcacggcagacttcgacggaaatcccgcccgaaaagtactatttctacactcccggatttgtggtagaataggagaaccaggttaacaaattggtattgcaggaggcggttatggactatagaataagaacaatgttagagggagaagacagcttgcttgaagattttttatatgaagctatctatgtgccggatggaatgtctgcaccgcccaaatcaattattaatcaaccggaattgcagatatatttaacggacttcgggaagaaaaaggacgatataggtttggttgcggaagttgataaaaaggctgttggtgcagtctgggtacgcattatgaatgattacggacatatagacaacgacactccgtcctttgctatttccttagataaagattataggggattggggataggtactgctttgatgaaagaaatgctccgtattctaaaagacagagggtataaacaagcgtcacttgccgtgcaaaaagcaaattatgccgtaaaaatgtaccaaaaaacaggatttgaaattgtggatgaaaacggggaagaatatataatgctatgccgtttgcaataacttgagacaactttcatggttctgtaaagggtacatacagttgtcatggtttctatgttagaataagagcaaagacataaaggagtgagaaagatatgatagaattaccggagtccatcacctatgccagtatgctgaaccagtatctacttggcaaaaccgtaacagctgtctgtcccccgtccgcaccccacaagttctgctggtttcatggggatgtgaatgcatacggcagtttattaaaaggtaaatcagtggaacatgcagatgcctatggaatctttgttgagattacatttgagggagggttatacctcaatttcaatgacggagtcaatgtacggcttcttgaagaaggggaaaacccgccgaagaaatatcagcttctgatcgcatttgctgacggaagcgcacttgtatttaccgttgccatgtacggggggattgcctgtcatcagggagagttcgacaatgaatattatctgaaaaaccgggcagggattacgccccttgacccgggattcacggaagaatattttctgaagcttgctgagtctgtgaagacgaataccagtgcaaaggcttttctggctacccagcagaggttccttggactgggaaacggcacccttcaggatatcctctttgacgcaggtatccatcccaagagaaagctgggtacactttcccgagaggaactgctggggatgcttgccagtgtgaaaaaggttttgggcgatatggcagcgaaaggaggcagagatacggagaagaatcttctgggacaggccggagggtatgccacggttatgtccagaaacacgcagaccggaggctgcccccgctgcggagggcagattgtaaaagaaagctatatgggagggtctgtttattactgcccggattgtcagccgctggtgaagtagggaggggaaggctgccggttcttttttctgcactccggacaacggttgcccggaagacatttctgcaggctgttgggagagcgcagaaaggaatggtgctcgggacatttccaccagacgggcttgttggatttcagggtgacatcctcaggcgtcaggccgtgatttttttccatatcccacagaacggccaggtccggagccagggaagccagtgaggtctcaggggctgctttgcggtggctgcagtaggggcatccgctttttcgcggaccggtgcggctgtagatcatagcaggccactcatgcccccgggcacatctccaccatacgttcttttctgtgcccggcagaacctgttccggtgtcaggctgccgttccttttatagttccattccctggcaatttcaggccgccgggcggccaggctgttagaatcacaaaccttgtagttggaacaataactgcagccggaaccatgctgtgtccggttcatgacagaagcctcatactctcttttgcagtccggacatttccaccatacttttttgccgcttccggccggcactgtatccggggcttctttgtttcgccggctccactcctgtgccaggcggggatatttcacagccagggaacgctttttcctctcgtgataatatttccgttcaatttcccagtgatccttcttgtggctgggtatgacggctatgtctgtcagaagggaaagcagataggaaataccctgatccagataatcgtcctgctcgctccagggataagtgataacatgatcggcatagtgaatcccttctgtgagctctttcgagtcccgaatccgtatcatgcgatacccttctttttgcacaaggagatccttgcgccgtgctctttctgctgccgcggcggaactgtgatagtagtaaccgtcatgctctatcacaattttttcttccggcagcagcaggtccaggatatacctgtcccggaacgggacctcacaggcacagcccggaaatatctgggacagataatagaagatggctcttgcggcatatgagatgcgaaactgcctggaacactggggacatccccgaagaagcgctgtccggttgctgattttatctgtccagacatgagccgggttgaactcgcaggtccaccataccttttcctggctgaaggggtggaagtctgagggcttttttccttcatttttcacatagttccactgaaatgctacgtcaggatacaggatttccagattgtaggtggcagagaccctctggccgctgcagtaaggacagatctccccgccattttgccggcagcgttctgcggatcggacctgttctttgattaagttggtccaggtatgccctttcctgcagcgccagtggaccgacgcatggcttttgggggtgtagagagtgggcggttctgtgttgcgggattcgtcccaataccggagaagctcgggataggcttctcccagattataaaagctgctggcctttctgtggctgcagtaggggcagtcgtattttctgcccggacgtgtgaggtgattggggttggtgtgccactgcaggccgcatacaggacactgcagcgtgatgttctttcccgaggagctgcccagctgatccgccggtatggggttgccgcccagctggtagaactggagaagctgctgctcctgatgcctgacacaccagtcctgaaacgtgatttttgctttcataggatgtcctcttttgttacggattttcttactataaaactttaccgcatagcgggaaatttgtcaaaacctggaagaactgccttttttactgtgtgggtttgctgcggtttccgcccccctgttttggctgcggaacgattttattagaaatttctgaaaaaatgtgttatactgataaagtaaccggctgttttgatggcattgtaatgcttatgaaaacagtttttccctttttgggacttttaagaaagcaaggtgtttatattgtttaaagtcaatgattttgtagtatatggagacagaggcgtatataggattgccagtatcggccagttggactttctggattccaatgagaaatattatagtctggagccggtctgcagcgacggcagcacgatctatgtgaagacctccagcaataagatttctatgcgtaacctgatcagcagacaaaaagctgagaattacctgtcagaactgagagagctggacagtttatatgataaggacagccgagccagagacagggagtatcaggatgttctgaagaacagtgagtgcgggaaatgccttcgtatgctcaaagggattaagcaggaagaacacagaagattagcaataggcaagaaactgaatgcagatgatgataagaacctgaaacgggtggaaaaaatacttttgggtgaactgtcggtagtatttgacagctcagtggatcaggtgaaggaaaagatgtctgcgctgtatgaggcttagagagactatttaaacgggtctgttgggaaaattgattcagattgagagtaaaaggtaatcaaatataataggaaagtaggcactctgcgggaaagcggggtgctttctttttctatatcttatcgttatacggataccggaaaagagagggcgtatgaccattcgctgtaccatctgctccacgatacgccgaacccggagatgatttcctttacaggaatcctttgactggtactttgcagcgaacgtttcggtgtcaagttgtgcttatgaaaccttacattgactgtaagtattattttgggaaaccttatgttatcattttatcataaaaagtacaggaggcagcgaaatggaacccattctaaatatagaaaacttaacaaagatttatggaaatatccccaaccagacaaaggctctgaatggcattacctttcaggtcatgccaggtgagttccttggtattatggggagcagcggttcagggaagtctacgcttttgaactgcatcgcagcagtcattcaacccagcggcggcagtattgcgatagaggggaagaatctcagttcacttaatggaaaggctatggcagagtacagaggaaaaaaggtgggctatttatttcagaattttgaattattggacaatctcactggctgtgaaaatattttattacccacgtcacttcacaatctgcctgaaaaagaaagccgtctgcgtttgaataggcttgcggaatatttagaaattgttgatgtactagataaatttcccatgcagatgtccggcggtcagcggcaacgtgtagcagccgccagagctatgatcctcaatcccaaaatgattcttgccgacgagcccacaggcgctttggattccaaaaacgcgaagaatgttatggagaaactttctggccttaatcggaacgaacaggcaactatactaatggtgacccatgattccaacgccgccagcttctgcaagagaatactattcattcaggatggtgtgatcttccatgaactccggcgcggagatgaaacccagccggttttttacaagcgtatcttaaaggtcatggctcagctgggaggtggcagttgtaatgttctctaatttgattttaaggaatagtaaacgcaaccgaaaagataacggattgttttttagttcgctggtaatttccataatagctttttacattattctttctatttcgaatcaggatgtaatgcgcttcttacagaaaatggagagcgatgcagtagataaactattgctcatgatccctgtattctatacaatgactttaggaatactgtttttcttgatttactttgcctgcaagtatcagctggaacgccgcaggcatgagttcggagtttatttgatgatgggtatgcgcagaagtaaacttttttctatgcttttggcagaagattttgtcagtagtattctggctttattgattgggcttcctgtggcagttctgctttctgaaatgatcagccttattactgccaaactggttggaatgggaattatcgggcatcgttttaccctgtctctgtctgctgtggttctgactgttattggatttttggttatcaagctgatggcatttttaattttaagcgggaatatcagccgtcaagaaataggctctctcttggcaaactcatctcgtaatgcaaaaaggcaaaaaccagggattgtttacggcctttctgctgtttgcggaattgctatgctgataattgcttatactatggcaattcaagggatcgcatggcagaaaccaaccatgatgttacttactttgctgcttggtatggcaggaactattcttctgttttacggtatgcggtcatttatcgcgctgctcattaaggcagggaaatccggcgggaaacttcgcatttttaatttccgtcaaattcaggagaatgttattcaacagtctacttctttagctgttagttctatgttgattttagcggctctgtgctgctttggtgcaggaattggaattgcaaatacaagcagccaatcaaatgcacatacgctggactatacttttacgctaagcgataatatagtgtttgatcaaaaaccagaccctgctcaaatttttccaggtatacagactatgctggaagataacggactgacaaatcagttttcagaattgtttcaaataagattggggcacatttatactacggataaaaccgaaaatgttttcaacatggagtctgtcatggaatcactgtataaactgccggagtcgaaagaccgtgatattcttttgaataatctcggctatggggactatccatatataatttgcctttcagactataataaactattggagttagccggaaagcctgctttaaaacttgcttctgacgaagcggcagtttaccgtgatcctgatagtacagcaaatgaaacaagaaacgctatgttaaacgagattcttgccgaacatccacaaaccgaattggacagtaatctcatttatctggttgataaagtacaatccgtttctttagtgacggatcgttccatcacccttgactttgccttgattttaccggatgaacaattcttttactatacacagggaaactatgatgtttatgttaatggtgtgttaagtgaagaggcaacgaaggggattgaattgatgaacgcttattctataattaatgaaaagttagataccattcatttagaaagaatggactttgaatatgaaagttatctccaaaacatgggcaggcagctcttttacatggtggccgccagttatattacaagttatcttgctattatctttttagtagtatccaacacgattatgggagttcagtttttaatgagtcagcagaggactgggcgcagataccaaaccctggtacggcttggagccacatatcaaaccctgtgtcattctgcaagaaaacaaattaactggtttatggggcttcctgtttttgttgccgctgtcagtagtctgtttggcgttaaagcgttgtttgccggtgtactctccgcagaagtacaaaatatccaggggaaaatgcttgttatctctgggattattattttattgctctgcgtcgtagaatatatctacatggctgttattaagcgttccagtgagcggtatttgctgacattaatgcagatgcaaagagaagaataaaagaaaggaggcggggccgtgatgaaaaaaattgcagtagtcgaagatgaaatttatatgcgggaagaactttgcagtatgctaaaaaaggccggatatgaggcattagaagtaactgtctttgaagatgctgtaaaatatttaacagccctcattcctgaccttgtacttttggatcttaatcttcccggaattagcggatttcaaatttgtcaggatctgaaacaaaaaacaactatccctgttttggttttgacttccagggatcagatgcaggatgaactgcaggcgcttcggctgggagccgatgaatatttaacaaagccctgccgtaaagaacggcttcttgcaaggataactaatattcttaaacgatatgaaggacgcccaaatcttctggaaggacaagaatttttgctggatcggggaacttatactctttatattcataatacttcggtggtgcttcccaaaaatcaagggaaacttttggaagcacttgtctccagtgacctggtaacatcggaggaactttgtaaaactctctgggggacaatggagttcattgacgaaaatgctctacaagtaaatttgtccagattaaaaaagaccatggcaacattgggaatgaggcaaaaaattgtggcagttcgcggtgtgggctatcggctggaaaggccggtggacttatgaaacatttatggacaaccataaaacgaaatgccccatggctattcgtgttattgattgcaagtgttttttctaccctattgctttggctttctaatgttcaagcatttcagacattagtgggtatgattttgctgtggagcctaacactttttgcttttgtgctggtttataccgatttaaaagaacggaggaaacaaagcctgtatcaagcgttcctctcaaatccagatgcagtcaatgaagaacgattaattagagcagtcagtcagcaggaacgggaacaaattcagcttttagcctccgttctgcggaaagaacagttgatccgatacaaccttgcagaagagctccgggattatgaggaatatgtggaaagctgggcacatgaagccaaaacaccgctgtctttgcttaccatgattttagataaccgggggaatgagatcccatctgatattcacactaaactagattatgtgtgtaatcaatttcaagaggatattgcacagatgctctactatgccagattaaaaagcagtaccaaagattatcggtttgaagaactaaatcttaaatatctcttggaagaagtcttagcagattatgccccacttctcgaagaaaagcagtttaccgttcaaaatgaaataggagcagaaacagtttttacagatcgcaggggctttcaatttatgctaggtcagatcgtcagtaatgtcattaaatatagcagtgacaaccctatgctaattatatcagcagagcatactgccagtgaaattgtgctttttataaccgacaacggtattggtgtaaaaagttatgatctcccctatatcttccaaaaaggttttactggtgattccactgacagcagaaataaagctactggcatgggattgtatttgactaagaaaatggcagatgatcttaacttgaagttggaggctgagtctgaatataaaaggtattttagaatatcagtacattttcctgtactcacaatggacagaaactaaataggggatgagtagcgaaagcggttggggacagggcagatcgatttggggacgtgttctttctagaaagaacacgtccccaaataagtttatcggaatacaatggaattaacgatggaagatgcctcttcccttaatttttgaatctcctcctgctgttcctgagtaaatatgctgatatctatagtatctgatgtgctgtttccggagataaaccatcgtccggcatgctgtcccagctgcctggagttttcaagctctgtgagtcctgcaaggctttcacttttagtattgaaggcaaagacatccagaatatcagcggatatctccccttctgcggcggaagcggtttcgttataccatatcccccagaagtccttttctgcataataagatgctttgccgacccatgactcagggagggtgagataaaagtagctggataccaaatgcaggccgtcctgcttaaattcactgccagagatggggagccactgtccggagttgtctacgtaaaagccgtcgggggtaaagcgggattcatacatggcgccggagcttcccacatagtaattgccgatccaacggtttttttccatggcgccggaggaagccagataataccaggtgctgccgtctttgatccatccggtcagcatttttccgctcttgtcagcgtaataccaggtgccgccgacctgataccatccggtggccatggcgccgctgccggtgagataataccaggtgtttccctggcgaagccatccggtctgcatggcaccgccgctgttggcgtaataccaggtacttttatccagataccatccggtggccatcgttccgtctgtgcggaaatagtaccagctgccctgccggaaccatccggttttcatggcgccgctgccggtaaggaaataccagtttctcccctgttttaaccatccggtctgcatctttccgctggaattgaagtagtaccaggtgctgccgtccagaagccacccggttttcatggcaccgctgccggttagataataccaggtgcttccctgtttaaaccacccggtcttcatggctcctgaggattccaggtaataccaggaaccgcctgtttgcacccatccggttttcatggcaccgctgccatccaggaagtaccaggttttgccgtccagaagccagcctgtctgcatagctcccgaatccttcaggaaataccaggaactgccgttttttagccacccggttttcatcgctccggaggggtcaaaatagtaccaggccccccctgtcctcacccacccggttttcatggtgccgctgctgtccaggaagtaccaggtggtgccaaggttaagccagcctgtctgcatggctcccgaactgtcgaagtaataccaggaatcgtctattttttgccagcctgtctgcatggcgccagcagagttcatataataccattctccgtgaaggtactgccatcctctgacgcaatagccgtctttgttaaagtaataccaggtactgttaacgcattcccacatatttatggggtaggtgccgtccgggcggatataccgccggccattgttggttatctgccacataacagggggtttggttgttgagccggggtttgaaggctttacatatgttgcatttagttcagcaacgactgtggctccggttgacgcgttttccacatccagtgagtagcctttctttatatattctgttataaaggaagtatccggaagccagaaattatctgattccttatcacttgtaaagtagtaagtattttcttcgtaggaaagagagacagaagcctgcagtgctttttcgttttccccattgaatacactgatgacagtactggaaggcaaggaatctgagggctcatatagagaatatcctccataggtatttccataggggtctttgagcgtaccgatcccgttgttataaatcatggtaatggtggaagagagctgtagctgggggatcgtataataagcagtatccccgggctcgccggctgcaggaaactctgttacaagattgttccgtccgtcctctccggtgacaaaagacagtggttctgactcctcaaagcattctatttcctctgcagagctgtctggtatataactgccagggtatttacccagggcaatgggactctctgttttaagtgtaataccgggccacggttcgccatttcttactgcctcgaactgcagtgttctcactgctttgccggtacggctttcgggtatgtaagagtcatccgaataatcataggtaacttcttcagaagtaagatctgtcgtgtaatgaaagaccaaaaccagatcttggtccggggcagtaccggatatatccccggtagtaaatgtccagccctcctgggtgacaggggcaaaataataaggtgaacctgctgctattttcatatcagcaaaataaaacctctctccgccggaggttacggcaaaatctctgtcaaataccagcgtattgccatcactgcaggctacggaatcctggatggtaagactgtggacgttttccgcactgatttgcgcacctgcgtgtgccggcgcagagcctgccataacaggaactgcccatagaacagccaggaagacggcggcagtgaatgccagatacagcgttttcatgtgttgtctttttcttttcataaaatccccctttttcatacactacctgcagatgatattgcagacagtacaatgtagtatgcataaattgttcgattaaaatatgccttacatatatgtatatagataattatacggagttaactgattagagtcaattacatttagagtaaaaagggacagagggggttgatttggggacgtgttctttctagaaagaacacgtccccaaatcaaccccctctgtccctttttacacgattctgtggtataattatgctatatggtatcggattccagcagttttccgatacaaattttttgacgggggaacaacttatgagaaaaagaataattgccttattgttggctgcggcaatggcagtttccggtccggagacggcctatgctttgcaggagaatgccatatccggtatagacagccaggaactgagcgaaacacaggcagaggaggtacttgaggaagaggcaggtacgcaggcgtttgcctttgacaatggaacgattaccgggtatttgggggaggattctgatgtggtgatcccggaggagattgacggagttttggtgactgctatcgggaaggaagcgttcagggataatcagaatattacttctgtttcttttccttccagcctggtggcaatcggccaaatggcattttctgactgccggaatctgtccggggtgctggagattcctgacagtgtggaaacgattggaagcaatgctttctataactgtatcggctttagcgggctgcagttgggaaacgggctgaaaacaatagagtcttatgcattttacggctgtaccggttttacaggggatctgatattacccgacagtgttgcttctgtgggcagcaatgctttttatggcaattcgggttttgacggttcgttaaagctgtccggttcaatgacggcagtcagtgcctactgttttgcagagtgtaagaatctgacaggaaaactggagattcctgacagtgtaaaaactgtaggatattatgcattccggaatgctgggaagctgacctctgtggagctgggacaaaatgtgacggaattaaatgagggttcaggctataattcgtactctagtttcgaggggtgcgatggtgtggcggacattaccttcaggggaagtaatccccccggcattcgcagcgttacaggaatgtttcagaatctgaaaggactggaatccctgacggtacccgcgggagcttaccgggactatgcgctggcttacggtgattatgtccaaaacggcgtgagattattgacggagagcgaggaagaacagctgattgaggagaatattctgatatgttatacgggcagtgcatcccaggtggagatacctgagggagtgacggaaatcggacctggtgcatttcagaacaacacttctctgcagaatgttacaattccccaaagcgtagagaaaatagaccggaatgcgttccgcgggtgtgcgcagctggaaaaagtggaattccccatgacaaatctggaattgggagagtttgccttttacggatgcagcagtttgtccggcatcctggagtttccggaaaatctgtcctcaatcaggaagggggcattccagggatgttccggcctggaaggggtcatcctgccggaatatttggcggaaatcggagacaatgctttttattactgtaccggattatcgggggaactaagtgtgccgcccagagtcaggaggataggcagccaggccttttacaattgctcaaatctcagtacccttattttgcaggaaggtttggaggctataggagactatgctttcagccagtgcagcggaatgaagggagatttgacgctcccggataccctgacagctttgggaaccagtgcattttcttcctgctcacagtttgagcgcttaacattgtcagaaaatctgactcagataaaagtatatactttttctgactgcaagggaatcagcggggagattgtcattcctgacagcgttgtgtccgttggatatgatgctttcagaggattgacgggtgtggaatgctttgtattcggcactggcttacagaaactgaacgcagacagcggatactactcgtactccagcttcagcggctgcacaggtgtgaaaacattgaagttcaggggaagtacgcccccctctctagaaaaatatacgggtgcgttcagggaaatgtctgcgcttacatcagtgattgttcctgtaggaacctaccaggcttacagcagtgcatacggatcgaaccttccggacaatgcccggatcacggaagaaggttctgacgggatactgattcaggacgggattgtagtgggatatacgggacacgacacgcaggtggagattcctgagggagtgacagagattggtacaggagcgttccagaacaataccggtcttcagaaggtgatactgccggtgagtatacgaaaaataggaaataatgcgtttcgtggctgtaccggccttcaggggcttcttacaattcccggaagtgtggaaactgtgggggacggcgcctttgcctactgcagcggactttccggcctgcgtctggaagaggggattcagacaataggcagagaggccttttataactgtgccggcatgcagggtgctctggagctgcccgacagtgtgacaagcctgggtggaagtgctttctcatcctgcaaaggttttgaaagtatccgtctgtcccggaatctggagactctgcccacacatacattttttgagtgcagaggggtaaaaggagaggttgtcatcccggataaggtaacagccgtaggatactacgcattttataatatgaagggtctgacccgggtagtgataggagccggggtaacgtctctgaatacagacagcggctattacagctatggttcttttgaaggctgcagcgcattggaaaagatcgtattcagaggttctgtgcctcccgatctaaaaagttacaagggcagtacattcagcagtcttccctctctgaaagagctggagattccttcgggaacctacggggcgtacgccagggcttacagctcataccttcagaccggacagcggatgtatgagaccgggcaggaaggctttattacagagggaagtactttgactgcttacgccgggaatgaaacagaggtgaggattccggacggaattacggaaatcggcagaggagcatttcagaaccattccggaatagaatcggtcatcctccctgactctgtggaaaaaatagccccctatgcattcaggggctgcactgccctccgggaagtttcatggggagaggggataaaggaaattggggactatgcctttggcaactgcagcagcctggaacagaaactgattctgccggatggaatagccgggattggagagggagccttttatttctgtgagaagctgcagggggcagaactgcccaagagcctgaatgtgattggaaagcaggctttctacaactgtacaggcatgaagggtgaacttcgtattcccggaaccgtatctgaggtgaaggacaatgcatttgcctactgcaaaggttttacttccctggtcctggaggacgggattcagaccatcggagagagctgcttttactcctgcagcgggatgagggggacactgacaatgcctgacagtatacattctgtgggaaacagtgctttttcaggctgcattggatttgccggactccggctgtctgaagaattagaaaagattgcccctaatacattcagcgcatgtacagggattcagggagaggttgtcatcccggacaaggcatcatctgtgggatattatgccttttatggctgcaaaaacattacggatgttacggtaggggcgaatgtacaaaagatgaatgaaattaccggttattactactacagtagttttgagggatgttccgctctgaaaaccataagatttaaaggtttgacacctccggatctctgtaggtataccagtatttttacaactctgcccgcgctggaaaccatttatgttccggcaggcgcctggaaggcatacagcgacagttatggaaattatctgggcgaacataccagaatcctggaggacggagcggacggcatggtgcttgacggttccgtattgattgggtacacaggaaacgaagaagaggtagaaataccggaggggattaccggaatcgcaaaaaatgcattccgaaacaatcgtacactcaaacatataaagttgccccagacactgacttacatagaagagagtgcatttcgcagctgcagcgggctttccggggagatagcgtttccggagaggctgaacaccataggaaattatgcgttttacggctgtcagggcctgaacggtcctttgattcttccggaaagtacagaaaccataggagattacgcattttacaattgctttggctttacctctctgacgctgggaagccatgtgactgctgtgggaaattatgccttctacggctgcaaagggcttaaagggaacctttggattccggacagtgtgacttatctggggggatacgccttttatgaatgtacgggtctggacggcagtctgcatctttcggaaaatataagtgaaataaaggaatatacaattacttctaccggcctgcagggggagcttattattcctgactctgtccgggtaattggatataacagtttttacaaaaacagcaaatttaccagcattacggttggaaaaaatgtggaatctctgaatcaagactattattctccaagtttttactcctgctcaggggtcacagcggtaacttttttgggaacggttcccccggatcttaaaggctgcagcgacaccttccggaccatgaaagccttgaagacgatttatacccccaaagaggcttttgatgcttataaatcagcctacagctcctatgtaccggccagtgtggaattttcgtgggataccttaaacctgcctccggggagtctgagggcagccaatgtcttcaacaatacggtgcaccttacctggaacccctccaacagtgaccaggtggcaggctattatatctaccggaataaccaggaggaacctgtgggtgtgacggaggagacttggtttacagacacagggcttctggaagatgcttctgttacctactatgtgtgcggatatactcaggatggccggacgacaaagagagcgtctgtctcggtaagaccgaaacggcctttcgtggagcgcatttatacagatcacatactaaataaagtaagccaggcaaaaaatatagtgtatgccagagtaaaggacacagggaatcttgggagtctcggcggaaaagccacagaaggacagttttactacctgaatgagaaaggtgagagaatccctgtgggagaggttttgacagcgccttatgcttctgacggggagactgctgtgtaccgtgcggagtgggatctggaaaatctgcccgaggggatgtatacggttgggttcgatctcactgacgtggacggcagaaccggagcaatgacccagagtatctattatgattcctcagtgcctgaaaaaatttccagcctgaccgcggtgggtgatacgaaccgcatcgtcttaaactggagcatggcccatgaagcggataccacccgctatcatatttatcggagaacccagaacgagtctgcatatacgctgtacaagagaatttacgggcgggacaccttaagctacacggatgccgctgccagggaaaatctgaagtattattactatattgtgggggtaaatgatatggggcaggagggaattccctctgagcctgcggctggggttcctcagacagacaaggaaccgccccgggtagtgaaaatgctcccctccaacggcaaaaccatcggcggcagtacggagctttatgtccaggcagaagataatgttgccgtggtattcacacagatatatcttacacgggacaaagggacaacctgggagcttctcagtgagaacagagggcaggactgcagattccagatggatacgtcagagtacggggatggtctggtgcaagtcaaaggcgtggcggtggacgctgctggcaatcgaagcagcgggctgatttatacctataagattgacaatcaggggccagatgaggttaccggcctctcctgggagagtacctcttccacaattactttgcggtggaaggatgttgcagataaggatctcagctttttccgtgtggagcagaagcaggaaaacggtgagtacacagccgtcagagacgaatccagaactttgggagtaaatcttacagggcttcggccggaccgtgtatatacgtatcggatcgtggcttatgatcagctgggaaacagagggataccgtctcaggatattgcggccaagacgaagaaggacacggagggtcctgtgattactaatatcagccctaaaccaggctattacagggataagataccggtatctgtgacagcagaagataattccgatgtggcatccatagaaatccagatttcttccgaccggagaaattgggaaaaggtaagccggacggactttgcaggaagcaatcctgtggaaactgcagcgtatgaactggatatttccaagagagcggaggggcctctgtatatccgggctgtggcggcggatcgcgccggaaatcagggggatacttcttcccaggctccgtatgtggaatacatatcggacaggacagcgcctggggttccccaggggctgacagctgtttcaggtactggttatatagaagtaacctgggaaatgggggaggatcctgatctggacgattaccggatttatcgggctgtgggagacagtgaagagtatgagcttttggcggagtctgtttacacagtcaattatgtagacagaacggccgaagacggagtttattacgcttaccggattcaggcccgggattatgcgggaaatgtaagttcatttacagaacctgtgggagccggggtgggagaggacaccatacctcccaagatcctgagtatcttcccggcggacaatggggtgacaggcccttctgcttccgaagtaagggtgctggccagggataaccgtgcgttggatacggtcacggtcttctatcggctgaatgaggaaactgcatggcggactttgaaaaaagagacggggattgacagttattataaacttttgagccagaatcttccggtgaaaaacttgaatcatggggacagggtatacctgaaggcggaggccagagatgccctgggaaatactgcagaatctgagatttatacctataccgtggataaggaagctccggcaatgcctgaaatctctgcatcagccgatcaggaggcaataggcttatcctggaccgggaatcaggaggaggatctggccggctaccgcatctaccggagatgtccgggagagtcctaccggctgaccgcacagagaagcaaaagcgagtccggggactaccagtatcgggatgaggatgttgagaaaaaccgtacgtatctttataaagtggaagctgtggaccaatatggaaatgcatcctgcagggagacggacagtgtgtgggttacagcagatcctcaggtacacgctgtgctcacctgtgagtccaaccaggaagcaggggtggagtatacatatgatgccagtggttcctatggggatctggatattaagtcaattctgattgatttcggcgacggtaccgcagagacggggaatcattttgtccataaatatacagaaacgggtacgtatacagtaacccttacagtgacggacacagaaggcaatacagacagcctcgcccggaccattgaggtgacacatccgcagcttttaggcaccttgaaggtgaaagtggcagatgcagagggcagtccaatatccggtgcaccggtatactttaatcttgacagcagccagaatactgtgaaatatactggaacagacggctgcactgtattttcagcgggggcggcccgatatgctgtgggttcctatatggaaaattatcttccggttaagaaaaatgtagtagtccgggccaataccactacggaactgaccctgacaatggtgagagaaccgattgtctcaggcggttttgaagtcgaccggatgactctggatgagattgtggcagcaggaattgatgtgacaaaaccggagaatcagcatgtgatgcagattaccattcatcttacatatggaaaacagccggcagagctgaaggttatcaccaacggaagtgatatctataaaggcgggaccaccattattgatacggataccggaacccggaaggttactgccactgtaattcctgtaacccagggaggagaaataggtcctggcagccagtctcaggagaatgtgatggttgcgctgatggacattccggtggaggcatcctgtctcaaggaattttttgatgtgaagctccatcttttgaaccatgcatccggggaatttaatcttacctctaatcaggtacatttgcatgtgcctgatggtcttactgtggtggatgccatggaacacagtccgtcggcggacgtggcgttttcagactttccgggacagacggaacggaccataagctgggtgcttcggggagataagacaggagagtactcagtttcagcagattacagcggggttctggatcttttccaggcgcctgttcaggccagatttgaggcggaggatcccattcaggtatacggaatctcaggactgtctgtgactgcggaaatcaaccgggatacagaagccggggctctttattttacccttggactgaccaatgagggggagacggatgtgaatcttccatctatagatgttatggatgaggttataaagagttatgagtatggggaggaggaatggcaggaaagagaggtcggcgtaaaggcattgcacgcgtatatgaccaacacactgggagcccggcagaatctggatgcagattaccaggtgcctgtcctccgcgcaggagagacttacacgaaaaaatacgcagcgtacggggcaattacaggggatgaggttttgtatctgcagaagacagtgacagagaccatgaacggcttgtcgattcctgtaaaggtaatcgtaagcgatatgaatttgtatgatatcagtgattccgatcagaagattcaggaacatatgacgacgaagaaggatgcgctgaactatgtactggatatggaaaataccaattattactactacattcaggcgctcgaggatgacaaggatttctggaaaaagcttggggaggcgttttacagctctacccaggctgtgctaaagctggatgtttcctaccttacaacagaggagcagagaaagctggtggacgcttatattcttcagctgttagaggatgaatccttccaggacgcggttgacttaagtgttgacaagaaactgatcgatcttacaaagagtatgcttgggcttttgaagacaaatctccaaagtccgggggacatcacagaaaaactggaattgacggatggggagatggaagagtccctgtcaaagctggagctgcttatggacgatgaaaagaatctgcggctgctggcaaagacgctgggaattgaaggcgcggacagctttgcaggccgtctgtctgttctcattggaacatcggccacatcaaatatcatccgatcttattttgaaaagaacggtctggtgcctctcgcagagagagatgcgcttctcggacatctcggggacacggcccaggtagtgggactggtcagcagtgcagcagatgggtggaactattcctgtgaatttaccaaccttctgcttcagattcacgcaaatcgggaagaggctgattttgttctggataccattattgagaccccgtatctgaacgagattgtggtggacgaggcaaaaagtctgaaggagaagctgggaaaggaatttgacgagcgggcagagcggatggaagcattctgcaaatcttttgtacctgacgcggcaattgcggtgacggaatacaagctggtgaaatatatcaaagatatttactcctccgggacaaccgctatgatgattgtagatattatcagggcagtttactctgctgcggactatctgtttgactggagcacgaaggtggaaaatcttcagaagcttcggtttactgccagcctgacgtacgcattccggatgaaatatctggatgcccggatgcaggacagcaatggggcgcttaaggcactgaaatatctgattaaaatgcggctgattggagaaaaagcttatattgaatccattcccggggaacagagggcatccctgctggcggtcatcagccgggaacagcagactgcctatgagtctctggaagagtactacaggcaaaaatccacagaaattataagcagcagggatcagctgtttaatgcttcctacaaggaactgtatctggcagaaggccctgaggtaactttgaattatgcggactgctgtacggcggaggctttcggtgaggaatatgaatattcctggaatggtgtaaactggaaggatggggaaggagccgttatccgttttaccccccgggaagcgggacaggtgctgtgggtgagaagaaaagctagcggggcagaactggcaggtaatattacaaagactgccatacctggaattccgtatcttaccggggatatagcctgctgcaggaaggatggatactatctgtttgaaaacctccctgagggggcgtatgagtatctgcttctggatgccgctgcagagcctgactggtctgctgccggggaatttgcctataaggcgggagaacgtctgaagattgatgagacggggaaatatatcgtactgaggagactgggaagcaatgccggggcgtatctgacttcttacggaaaacagatcacgatcacgtatccggtaaccattcaggtacaggcagcagcgggcggtactgtatccgggggcggagcgtatctgcccggtgaggcggctgtactcagggcagaaccagactacggatatgaatttgccgggtggtataaagataatactttagttgcccataccccggaatatcacctgtatgtacaggaggaagggacttatgaggccagatttctggagaaagagaagggaacggttatagtctcaggcagtccctccgagggagggcagcttaccggaggcggtatgtatcccgtaggagaagaggtcaccatacaggcaagaccggcagagggatggcggttcctgggctggtaccagggggacacctgtgtcaccagtgccggatcctacatagctgtctgcagggaaggggaggaacgttatacggccagatttgagcgaatccccgggaaaaatgtgaggatctacagcaaatacccatttaccattaatgggaatgcactgtcggaggaggaatataaggacggcatttatacaaaaacttgggagaccggtcagaaacttcggctctgtgcggcggatggaaatgggagatttgcttactgggcttacggcagcgggcagattctgagccggaaagccgagtgtacgattatgctggcagaatctgttgatttgtatgcagtatatacggatcaagacagtgataaatccacagtattattcctgaatttctatgggcaggtggtcgcaaaccgtgaatattcagtgaggagcaatatcctgtttccgtcaggtccttcacgtcttggatatgtatttgcgggatgggataagacagaggagatcatccggcaggagatggcagagggaaagggattgatagaagtaaaacccctgtatgaggaaaaagaggcggcgtggaatattttactggagaacgcagcgattatggattcctcaaaggagcctgcggcagaaggcagatatccggaggggacacatttgactgtgaaagcgaatcctccggaggcaggaatgaaatttgcctattggacggacagaagcggaactataatcagttaccgggaaacatatacctttatcttgactggagatactgcgttaaagcctgtctacactgaaaccgggacagaggcggaaccaggtatggtgctggctgtaacagatactgacacctttttggaggataatgtcagaaaaatgtcctttaccattgccagggaattgccggaggacaagagaatattgagccagggagtcttatacaccacagatccggccattgcctctgacaaagaaatgataagaggcagcagtgccggggaaaaagaaataccagcggaaggaaattccgggatttaccggcttgtcatcaacaatatagagccggggaaggcctactactgcagaagttatctggtataccgggaggaagacggaacagaaaaagtggtatacagcaagattgctgccaatacttatatagaagaaaaacccgttctgcgcattacaggaaccgggaactatgaggaagacggagtgcgaaagctgtcctttatctcctcccgcagtgtacctgaggactgccagctgctggaacttggatttttatataccattcagggcgcagaagccacagaaaaacagatgacgctggaaaatgagaagataaaaagatatcaggctgccttcaccaggccggacggtaccttcatcttttctctgagaaatgccagggagggggtaaggtgttatgccagagcctatctggtttaccgggatcgggatgggaaccagcatacgcaatacagcaatattgcccagaacgtttaccagaagtaaaaggggacagggcgatctgatttggggacgtgttctttctagaaagaacacgtccccaaattcctccaaatttctggaaacatatgttataatagatcatagtataattgtttggggagatggctatgaccatagaagaactgaagaaatttgagtccaacaaaagcagatttgaagagttgtatctgtgcgacaggaatgatattgtcccgtttataggcgcaggggtatctaagggatgtgggttttacacctggaatgagcttgtcagaagggtggcagacaattatctcacggcggatgaatatgaagcattatctgccagactggataatatggaattggtagatgagctcattgctcttgtgaatggaaatgtcaccgcagttaagaagagaattgcggatttaatcataaattgtgagtttcatcagacaaatgtaaccagaagtctggtgtctgggttttctaaatgcatgattactacaaactacgacagggttctggaggaagcgcttgcccttcacggggaaagtgttccggtgattctgccggttatggcggatcagactgcaggagcgctccaggataagaagggctgcattttgaagctgcatggtactgtagaggaactctcaagtatgatcctggccagggaggattacatgcaggcgtatggcccggagggaacactggatgtatccaggccggttccgctggcgctttcgcttttatttgccggaaagaggattttatttgccggctgcagcctggagaaggatcgaaccttagaggttttaagcagggtgatacatcagaatcaccacatcaatcactatgcggttcttccctgcccaagtgatgcaagggagaagaacgcattaaatatcaggctggatgctttagggattcttccggttttctacccggaggggcggcatgagtgtcttgagataatactgaatgatcttataaagaacagcaaaaccagcaggactttgcctcaggataccggtggaaaaagatggagcagaaggctggtgcaggtccagaaagagagggaggccaatcaggtgattcttccctggatgcgcagcagcgccggattccgtgcggtgtttccggatttatttatcccacccaggatacaggggataaagtcaaggacccggctttttacagaacatcttctgaaggagtttggagagcgcaatctggtaattaccgggaatgccgggagcggaaaaaccactcttttgaaatacttattcttatttgaaaatccgggggatgagattctatatctccatgcgtcggctctggcaaaaaaagactgttccggatatgaagagggagtaatcgggttcctattgggcagaaggagggcgaaaacccataagctgattcttctggatggtattgacgaagaatttctggataaaccagaggaagtgtacagactcttggaacagatgggaaagaacagaaagatccatgtctggatcggctggagaaaagatcactacaacagctgtgaaaatgaagccctcaatcgctttttctatgagacagcagagattctggactggacacaggatatggccagagactacattcataattactgtacgaagcttggcctgaagggggtggcagagagggcagaggagctgatgacatcaggagatgaagtcagggaattaatgcgttccccctttcatgtggtgcttatgctttatctgatagaggctgagagagaacagccgcctggaacacggtgttccggtattcaaagtctgtatggattgtatgaaaccttcttttgctgctggtggaaaaaggagaaaagcagaggaaccaccagaggaagtctggaagaaatcagaacatatttatggcaggcagcagaggctacctattatgggggtacatgtctgctggaaaatgaagattcagcggcggaagggctgctgtacatagataacgtggggagttcatctgaaaaaaagatagtgaagggcttttatcacagaagtttttgctccttctttcgggcgaacaagattctggatgccatggagacagaaaaaggatttttggctgaggcattgtcaaagcccctgcgcaatgacataacggattttgtccgcagcggaatcggcgaaatccatgacaggaaaaagctggagaggattcagcatacacttatgaatctgtatatagaacttgtgaaaccgggagagacagacctttcagtgggattgaaaaaggaagtaggcaaactggatgaggatgatgccttttatcttaaaaatgaactggtatatctaattacgcggtatcccagaacctctgtaaaggtggacaagtttgtacagatggtcgcacacatagaagaggatccctatatgaggctggacattgcttacggggcagtgcttacaggcccttttgagctggcgctggaatatgccaaaaagctgatgcccggaacagaggaagatttcgtaaaccgatcctggactgtggcttactttggggacgtacaggctgtaccctaccactacagggacacggaacaggcgccgtggacaaaagccagggaagcgagaatgaaacggctgcagtcccggaaagaaaaagctgtgcggttccggatactggatctgccgctgctgtactgtttttacgaaagcagggagtggaaggatgcaacactgcaggattatgagatcatcagacagactgaaattgaaggtgagtattatacagaagaagagaaacaatttttgaaggagcagaaggagaagctgctggcagcttttgaagaagaaataggaataaaatagataagaagggacagggcagtttgaaaatgggacacccctacccctaaagtgggacgtgttccttctaaaaagaacacgtcccctttttaagaaaaatcaggaggagaaacagatgaagaaacgacttattgcgttagtgctggctctgacaatgctggcagattctccgggcatgctctatgcatcccagctggaaccttctacagagtacagtagcagggaagaggaaactgattccggagaaacaatgaaggagataacatcggatgttcagccggccgcagagaccggggatatgacagagcctcaggaatcccaggattttgtttttgacaatggtacgattaccggttataccggaacttccagcgagattgttattccggaggagattgacggcattccggtgacggagattggtctctatgcgtttttggagatggagagcattgtccatgtctcttttcctgctacgctgaagaaaattggaaacggcgctttcagaaaatgccggaacctggagggagagcttatagttccggacagtgtggaatatattggcgtggacgcgtttaatcaatgtacaagcctgaccagtctgtcactgggaaatggggtaaagacaatcgagggctatgcgttttatgggtgtaccggccttaccggagaacttgtgctgcctgaaaacttggaaaagattggggaggctgccttccgggactgcaccggactttccgggactttgaagcttccggatactttgaaaacactgaagtccggtgtgttctacggctgcagcggattctccggggagcttgacataccggatcaggtaaagcagctggagagcaagacgttctatgggatgtccgggattaccgggttttatattggcgcttcggttgagcagattaacctggcgggacccagcttccaggccggaaccttcgatgggtgtaccggagcggaatttataaagtttagatcttcggtccctccagatctgggaggtctgatagaaacgttttctgatatgacgtctctgaaacaaatatgggttcccgcagagaactataaggcttacaacctggcttaccagaattatgtgccggattctgccagggtctttacagagtcaagttccccctttatctccgacgaggaaggcgtgctgaacgggtatgtgggagaggaagaggtggtctgggtacctgacgggattaccgccatcggtgtgggcgcgttcaggaataatacatcagtgaaaaaaatagtacttccggcgcagcttacttctataggcaaaaatgcgtttgcaggctgtacacaactggcggagcttcagtttctgggagaggttcccccggatatttcggaaaatccggatatatttcaaaatctggagagcctgactgctctgaaagtgcccctgggcttttatgatgcgtaccgagatgcctacggatcccgcctgccggagaaggctgtgctctctgaaaccggggcagaggattttcagatagacgggactgtacttaccaggtatacaggaacagagagccaggtgcggattccagaaggaattacagagattgctccttatgtatttcagaacaacgccgcagttaagaaggtaatctttccggaatctctacagagaattggagattatgccttcgacggctgcagtgaactgacctcactggagctgaatcagggtctgcagtccatcgggatctgtgcgtttcagaactgcggcaaaatagaaggcagtctgacggttccgtcttcggtggcaaccattggggcaggggctttttcctggtgctccggcatagatactctggttttggaagagggaatcgcatccattggaaccagggctttccgcggctgcagcggcatcacgggcactctgcgtcttccggatactctgactgccatagaagcggaaagctttatggactgcagcgacattgaaaatattttctttccgcggatgcttgagagaatcggcagacaggcttttgagaactgtacagggttccaggaagaactgatcatccccgacacggtaacgacggttgaatatgctgcctttaaaggcatgaacagacttcccagcgttgtgataggagaaaatgtcgagtatctgaacggcggcggttacagtgacagttctattttttacggctgtacttctcttgaaactataacatttttgggcgctgcggccccgtacttcggtgctgtgggggatactttttcgggactaaccagtctgaaacactttatcattccccagggatcctatgaaagctatatagctgtcttcggggatggccttccagaaggcatttatcccacagaagctggagcagagaactttgtaattgaagaaaacagactgatagcctacttcggggaggagtctgcagtgcaggtgccggaaggggttacctctatcggaaccggtgcattctacaaccgcacaaagattgagcaggtgatattgcctgacagcgtacaggtgattggagaaagcgcctttaaagagtgcgggcagctgaaaagtatccagctgggcgccggtatacaggaaataaaaaataatgcatttcgaaactgcagcagcctggctcaaaggctggagctgcccgggggaactacaaaaatcggggactatgcattttccggatgcgtgaaactcagcggactggaactgccggaaggtctctcagagatagggaaatctgcatttgaaaattgtacaggtctgacaggcgacctcagtcttccgaatggactggagatgattgagagcagcgcgttttacaactgcttcggactgagcggcagcctgacgatacctgagacggttaaaacaatacaggataatgcatttgccgggtgtcatggcctgacaggaaggctgatgattccggacagcgtcacagaaatcggacaaagcgcattttacaattgctcaggatttaccggcctcacactttcagaaaacttaacaagagtgagatatagtactttttacgggtgttcaggcgtagaggggcagctaattattcctgaccgtgttgtcacagtggaatactatgccttctgcggaatggagcatctgacctcagccgtgatcggttctaatgtggaaacactaaatgcaggcaccggatatggggatacaaccttcgaaggctgctcctccctggaggaaataaagtttctcggaaccgtacctcctaacctttcaaatggtacctccatgttccggaatctgcagagcctgaagaaaatccgggttccggcaggaacatatcagacatatatgcaggcctacaattcctatctgacggatcagataacacttttagaggaaggggcagatgaattcctgatccgggatcaggtgctggtgagttacagcggaacaggaacagaagtacagattcccggcggcgttacagagataggaacaggggcatttctgaacaacggtactgttcagaaagtacatatgccggactcagtagtgactgtcagcaataatgcgtttaaaaactgcgcagaactcagagaaattaatttctctgcgaatttgaaaactatccgggagaatgcgttcagcaattgcgcaaaccttcaaaaaattgagcttaactctggccttcgggacatagggggctatgccttttacaattgcagcggtctgaatcaggaactggtgctccctgatacggtagaagaaatcggagactatgcatttttccaatgtaccaatctcacaggtcttacgctttccgctgcacttaccaaagtaggtacgggcagcttctggtactgcaaaaacattgccggagagcttaggataccggaatctttaacatggatctccaactacagctttgccgactgtcagggtctgacaggcctgtcgctgccggacggcatgaagagtattcaaaatggggcattttcaggctgtaccgggctgtctggtacgctgcgctttcctgacagcattacctacctgggggacgaggctttttcaggctgcagcggattaacagggctgaaattgtctgaaaacctggaatctgttactaatagtgcattccggggctgcacaggaatagaaggagagcttgtcataccggataaagttacatacctgggatacacggcatttgcagaactcgaaaagattacaagcgtagtcataggagctaaggtgacactgcttgggggagctgtaaatatatacgataacaacagcttcctgaactgcacgtccctggaacggatgatttttaaaggcaccacccctcctgagctgagatacaatacagaaatgttccggcagctgccggcgctgaagatactgcaggtacccggcggctcttacggggtatacgcagctgcctacggcgattaccttccggagggagtggtaattcgtgaggaaggtgcagaggactttatcacagacggcaccgtgctggttcattatgccggcagtgcagaggaagttcaggtgcctgaaggtatcacagagataggaacaggagcctttctgaataatacctcggtgacaaagataagcctgcctgacaccgtggaaaaaatcggtgtaaatgccttccgcagctgcggcagtctgaaagaagtcgcattgggcagcggccttgtggagatcggggactacgctttttaccagtgcagaaatctgacacagaatctggtgcttccggaaggccttaaaactatctgcacatacgcatttgcagagtgtgagaacataacgggtgtgactcttcctccggaaatagaacagatcggcagctatgctttttaccagtgtactggtatgaccggaaatcttaccattcccgggagcttaaagagagtggaatacagtaccttcgaaggctgcagaagccttacaggtcttacgctgggagaaggggtggagactgttgccgcctgtgccttccggggctgccagagtatggcgggggaactgtatcttccggacagcataacacttctggacagcgaggcatttgccagctgcaagggctttacaagccttcgcctttcggaacatttaaccatgattccttatctctgttttgcatattgtgcgggtctggaaggggagattcgtattcccgacagcgtaaccaccataggaaaccatgcattctatggcttgtccaatattacagcagttaccataggcagaggcgttgctacgatctacaatagagttgatgacagttgtttcagcggctgcaataagttggaacagatacgtttcctgggcgataccccgcctgatctgtacaatacatacggtgccttccggggacttccttcgctggcacgtatcctcatacccagcggaacctacagggcgtatacagatgcaacttatgcaaccgcacttcctgacagggtccgtatgacagaagagggcagcggtgatttcgtgattaaggatacggagctgatcgcctactgtggcacggacgaggaagtaaacattccggaaggagtcaccataatagggagagaagccttccggaacaatcaggatataaagagggtaaacttcccccaaacgctccaaaaaatagagaagaatgctttcaaaaactgtacacagcttgcaggcccgctaaaactgccggatcagcttaccggaatcggtgagtcggcgttccagaactgttcggcgcttagcggtgtcctgacaatcccggacagtgtcgcggcgattgacttatttgccttccagtcctgcagttccctttccggactgcgcctgggcagcggggtagaaaaaatcggccggaatgcttttgagaactgtacaggtctgaaaggagatctgtaccttccggacagcctggcaacgctggaggacgctgctttcagcgggtgctcagggctggacggcactctgcggctttccgggaatctgaccgtcattcatcagagtgtatttgccaactgcagcagtctttcaggagaactgattattccggacaaagtgcaggaaatatatagctatgcatttttaggggatgaaaaatttactagtcttacagtaggaaaaaacgttaaaattatgaatcattccggcgggaacagcttctacggatgtacagggatccgcacagtaacctttttgagcagtctgcccccggaactgaatggacaaacagacatttttaccggccaaatgacctccctcaccaatatttacgtgcttggagagtctttggaggcgtatcgtaccgcatacggtccttaccttcctgaaaatgtggaactgtcctcagataccctgaacctgcctccgggcaacttccgggcggcgcatgtatacagcaataccgtacatctcacctggaatccctgtgccggcgatctgattgagggatattatatttaccgggatcagatggatgcgccggtggcggaccttacttctttaagctttacagatgcaggccttaccccggggaaaccggtcacctattatatctgcggctatacggctgataaaagaactacaaagatggcggctcttatggttacgccgaaagcccctgcgccggcaaaaatcaccaccgaccatattcttaacaaagtaagcagggcaaagaatacgctgtatgccagcgtggaggatacgggaaatctgggagcgctggacggaaaagtaacgacagggcagttctattatctggacgaacagggacgggagatatccatcggcggcgagctgacagcccctgacaccttagagggaagcaccgcagtctacaaagtaaactgggatctgggcggcatagaggacggtatgtataccgtaggcttccgtcttaccgacattgacgggaaagaaggaaccgtaacccaaagtattttctgtgacaacaaggcgccggataaaatctccagtctggcggcagtaggggatacaaacaagatcgttctctcctggagcattgcccatgagatcgatacaaagcaatattatatttacagaagaagccaggaagacggggcctacaccttatacaaaaaaatatacggcagggacacccttacctggacagatacgactgcagagcagaatataaagtactactattatattgtgggtgtcaatgatatggggctggaaagccctccgtccgacacggctgcagctgtggcacaatccgacaaagagcttccgagagtggtgaagcttctgcctgccaacggtaaaatcatcggcggcacggttgaactctatgcccaggcggaagataatgtggcagtgacagaaacccagattttattgtctgaggatgaggggacaaactggacgcttctggaacaaaaccaggctgaattctgcagatatcagctggataccgcccagtatgaagacggggtggtgcaggtaaaaggcatagcaaaggatgcggcgggaaatataagcgacggccttatctatacatacaagattgacaatcaagggccggaacaggtaactgggctggagtatgagagcacagctaccaccgttactctgaaatgggcggatgtggcagaccaggatttcagtttcttccgcgtggaaagaaagctggaggacggaagctatgagacggtgtgcgatgagtaccgtaccctgggagtaaatattacagggctgaagccggatagctcttacacttaccgggtgacagcctatgatctccagggaaacaggggaaccccatctgaagaaattactgcggcaacacagagcgacagcattgctcctgtaattacctccatagaccctaagcccggatactacagggatgagataccactgtgtctcacagcatgggacgattccggtgtggcctctgtagaaatacagacatccacggatatttataattggaaaactgtgacagcattagaattcagcggagataagcaggaggaaaaagccgcctttcagttaaatgtcagtgattcagaagaaggcaatctgtatgtgagaggggtggcggcggacaaagccggaaataccggcgatgccaccatggaagcaccgtatgtacagtatatcgtagatcatacgccgccgaaagcaccggaaggccttgcggctctctctgatgcaggttatatagaacttcggtggaatatgggagaagagcaggatctggacgattatcttctctaccgggcagaggggagagatggtgaatatcagctcctggcagagaagctgtatgctctgaattatatagaccgcacggcaaagacaggggtggaataccggtacaggcttcaggcaagggactatgcaggcaataaaagtgcatacggagaggaactgaccgcttccatggctgaggacacggatccgcctgagattcagagtgtgtatccggcagacggggctgtcttaggtccctctgcctgcactgtaagtgttttggcaagtgataattacaaattaaaggctttggaaatcctgtatcaggtaaacgaagaggcttcctggagaactctaaagacagctggggatattgacgggtattataagcagctgaccgcggatctgccaatcggcagtttgcaggagggagattccatccggctaaaggctgtggcacaggatgcaggggataatcagacagagtcagagatttactcttatacggtggataagactccgcccacaatggaaaaaattaatgtgtccgcagacagtgagaaaatcacccttgcctggaccggaggccaggaagaagatttggcgggataccggatttaccggaaggacggcaaaggggagtatcagctcatcagccagagaagcaggagggaggcagaggaatacagttacagcgactacggggtggagaaaaataatacctactattataaagtagaagccacagatcggtatggaaatgccgcgtccagagagacggacagcgtatggctggcagcagccccccaggtacggggagatctgatctgcgacctgcagcaggaggtaggggtagagtacgtttacgatgccagcggttccgctgcggacctggagattgcagacatcagcattgattacggcgacggtacggcaggcaccggtgcaaaaacagtacacaggtattctgcggagggaacgtataccgtaaccctgaaggtgacggacagcaaaggaaacacagatactctggccaaatcggttgaggtaacccagccaaagcttctggggactgtaagggcaaaagttcaggacaacgcgggaaatgccctctctggtgtaccggtatattttgatctggaccgcacggcagaaaatgtaaaatatacggacacggagggttatgttacgtttgcagcatccgccgcctcttatggggtgggaacctataaagacgggtatcttccggtaaaaaagacagttgtggtccgggccaatactactgcggaagtgacgctgactatggtacatgagcctattgtcacagggaactttgaaattaaccggatgactttggatgagatacgtgctgccggaattgatgtaagcaaaccagaaaaccagcatgtagtaaaagtaaatattcaccttacctacggcagcaagcccctggatatggaactgatcaccaacggcagtgagatattcggagggggaaccactatcgtagatacggaagagggagacaggcagattacggcaaatgtcgttcctgcccggcctgacgcagggggcggcagcggaaccggcggaggctttataggaggattcggagacgatgacaacgtaatcattgctctgatggatgtccctgtggaggcgtcctgcctgaaagagttttttgatgttaagcttcatatcctcaatcatgcatccaaagaatttaacctttcctccaatcaggtacagctgaatgtacccgaagggcttaccgttgtggacgccatgaacagaagctcttcctcactggtgaacttcccggaacttcccggacaggcggagaagaccctaagctgggtgctgcggggagatcaggaaggaaaatatgaaatatctgcagattacagctctgtacttgacatgttccaggcgcccgtgcaggccagattcgtgtcagaggaaccaattacggtatatggcctgtctggtttatccatgaaggctgtgatcaacaaagacatcagcaacggggccatgtactttgatctgggcctgtcaaacaacggccagatagattactacctgcccactatagatgtcatgggagagattattaaaagctataaatatgaggaagacaaggaggaggaggaactggagggcagagatgtctctgttatggcattgaatgccacattaagcaatggcagcacagggtatgcccagatactcgatcctgacaaggagctggaaacactccatgccggagaaacctatatgaaacggtatgttgcctacggggcaattcaggaggaggatcctgcttatatccagtcggctattgcagagacgctgacggagctgtccataccggtagagatttctttcattcagatgaatttgtttgatatgagcagtccggatcaaaaagtcaatgaacgctggaacagcaatgcaggggaaaaggaattcattatggatatctataatacgaatttctattatttcatgcagtctatctacgatgagaaagatttttggaaaaatctaggcgaatttctctacagatcctcgaatgtattatttaaagcgaacttcagtatatttacagacgaggacaagaaaaaagtgatagactcttacatcgttcagctgctggcagatgagtcctttgacgaagccgtagatctcagcgcacagaaaaaatacctggatatggcaaagggtatcataggagtgctcaaaggatatttgaaagacccggcggatttgggggaaaagctggacataccagagagcgaggcgcttaagattatttcaaatctggatatcctgtccggggatgagggcagtatccggaaaatagccaaaagtctggaactggggggaaccgatacatttaccagccggctggtgactatgatagcaacaacagggtcagcggcagcactgaactaccttttccagtctacacgcgtaatcgaaaaagcacagcgggaagccatgtcaaaagaattaaaatatataggaaccgccattgatttgctgggggatgccgcggacggatggatctactcctgcgagttcactaatacccttgtaaagattaaccagaacaaggaagaagccatgtttattctggatacggtgatcaatgcccaggggatggatgaactggtagttaaagaggcaaagacgttaaagaagaaaatatcagatgaatttgacgccaaagcagaacagaccgcagcatttatcaaaagcacagccgttaatatgagcggtacggcactggaactggccgtgagcgcctttattaaagcaaaatttttagttacaggacctgtggttcttgccatcaaggcaattgtcacagcaatatacggcgggctggagtatctgtttgcctgggaagccagtgttgaaaatcttcagaaactcagatatgcaggggcgctgacgaaggcattcagggataagtgtcaggaatctttgaacagctttgacaatttatccgcactcagatctatgaagtatctgattaagatgagactgctgggagaaaaggcttatattacttcaatctcggaaaataagacagaggaggtgctaagtaatatcaacagcgaggcgggagcttcctacaagtccctaaatgaatattattgggcaaaagaatccagggttttatattgccgggatatactgtttaacacaacctaccagtctatggaggtgcctgaggcacctgcggtatctattaattatgagggctgctgtacggcagaagcttttgggaaggattatgaatattcctgggatggggttcagtggacagaggcaaagggtcaggcaattctatttataccaaaggagaccggacagatgctctgggtgagaaaaaaggcatctagcgaagcgccggcgggcaatattacaaaaagggctattccttctgcgccatatatcacagacgagattacctgctcttacaaaaacggagcttacaccttccagggcctcacagggggaacctaccagtatcttctgaccgatcagaccgagggatacgactggacgaactgcgggaccttcacctatacggcgggcctaagactggaggctccgaaggagggtacctatctagtcctgagaagaatgggcagcaatgaaggaagataccttacctctgttcccaaaagcctgaaggtaaactatccggtacagatcacagcagccgcctcagcgggaggcactgcggagggaaccggggagtacctggccggagagacggcaatactgaaggccgtaccggacaatggctatgaattcctgggctggtattacaagaacagcctggtggcacagaccgcagaatatcaggtacaagtgcaggagtccggcacgtatgaagcaagattcaaagaaaaggaaaaaggaagagtggtggtgagctgtgaacctgcaaacagcggacagctcacaggcgggggatattatctggccggagaagaggtaaccatttcggcagctccgcttgccgggtgggagttcctgggatggtaccgggacggacagcccgtcacagaggcgggaacctatgcgttcacctgtacggccggtgagattggatatacggcccggttccgtcaggtggagaaaaagaaagtggtgatacacagtgagtatccttttactatcaacgggagaaagcttacagaagaagagtataaagacggtgtgtataccggtgagagaaatacgggggaaacgcttctgttagaggcagagaattccagggggaatttcgcctactgggcatacgggaatggacagattgtaagccgcagccccaagtgtactgtgtctttggcccaaagtatggctttatatgcagtatacaacaccctggatacggccagggcaacggtactgtttttgggatactacggacagattattgacagccaggaatgtacagaaaagagcagcatcctgctgccgccaggtccttcccgtctgggatatacctttaagggctggagtatgacagccgacgagatccgccgggccattgcggggggaagcaatttgatagaagtcaaacctgaatatgaagagaataaagccgcttatctggtgacccttgtgcaggcaaacataaccgatgcttccagcgggccggacgcacacggggcatacccggaaggaacccgcatcaccgcagaagcggcagagccggaagaaggaaagaaattctcccactgggaggatgaaagaggcttcattcacagttaccgccgggaatacacctttatcctgaccggggatatcagtctgcaccctgtttacgcagacagccaggtaagcacggaggaatccccggtactggctgttaccggcaccagcaccttcctggagaataaagtcagaaagatggactttactgtcatccgggatcttccggatggatataccttcctctctcagggaatgctttacaccacagacgccgcgcttgcaaaagaagagacaatgatgaaggggtgcggtgccgctgaggagttaaccggcgcacagggcagccagggaatgtatcgcctggttgtgaacaatgtaatccccggtatcacctattactgcagaagctatgtagtttgcagggatgaaaacggtctggagaaggtgatttacagcaatattgcctctaatatctatatcgaggagcggccagtgcttctcctgtcggacacaaaggcctatgaggaggatggaaccagaaaactatcctttacctcagtcagaactgtgccggaagactgcagacttctggaacttggatttgtatataccacagacggcacgcaggccggagaggacgaactggttctggaaaatgaaaagctaagcagatatcaggcgggctttacgtcccctgacggcatctttacactggcccttcgaaatgcgaagccaggagtgagatgctactgcagggcctacttgatttacacggacagagatgggaatcagcacaccgtatacagtaatacagcacaaaacgtgtacttggaaaactagacagaagagagggccggccagacactctgggtgcgtctggccggcccgggaaattgaggacgaaatatgaaatcaatcagacaaaacaaaatatgggcagcactgctgctggtagttcttcttgggggactgcctgcagtgtatgtgtatgcacagacagactacagcgaaggatattttatttatcaggatcgtgggacttatgcttctgtaaaagaatactttggggaagagagccgggttgtcataccgtcggctctgggaggaaagccagtggcagagattgaggcagaagccttttttggggcagagacggtaaaagaactggtcatcccagatacggttgtaaccataggagaaggagcgctggatgggattcccagagtagagtatcagacctcagaggagcctgaaactcagccagaaggggaggaaccgtcaaagccggataagcagaccgagctgccccaggaggacggagaactcccggaagaggaatctgagacagatgcggcagaacctccccaggatcagagcggggcccaaaatgaggagacaccttccggcggaagcacaaacggtgagaagagcgggaacacgccggccagcgaagaatattcattggactggaaggaggataatgtccaggtcacagaaaatggatacggcattatgcttctggagggaaacggcacagatgccgctgcagctgagcggggggaggcggaagctgacgctcctcttgacaggggcactgcagccgcctgtgtatggattctctccgtttctgcagttatactgatgggaatagggattttcgtaaagaaaaaaaagctggtatgagtgatggaagtaccggacaaagaagcttgccgggagctaaagcttccttctttttttcatcccggcaagaatcagagtcctggccttctctgcctcctcctttgtggcctctctggtatccccgagggggtaagggatttgtaaagcctcatatttcaccttccccattgagtgatagggaagcacatccagggcctgtacacaggaatattccccaatggcatagcccagggcccagagctgggagggggaatcggtgatcccgggcaccagcacatgacggatccatacaggtatctttttttcatccagatgcctgagaaagtgcagcacaggctggttggaacggccggtcagggcctggtgggatgcgtcatctatctgtttgaggtcaagaaggaccagatccgtagccgcaagcaattggtcaatttttttggaggcagaggaactgccctccctgggataagtgattccggaggtatccagacaagtgtggatgcctctttttttggccgccccaaagagttctgtgagaaaatccagctgcagcatgggttctcccccggtggcagtgattcctccctttttatagaaagatatattcttctcataaatatccagaatttcctccacactcatacgggttccttcttttaccgcccaggtgtcgggattgtggcagtacaggcaccgcagaggacagccctgaaaaaagattaccagccggatgcccgggccgtccatggagccgaaggtttccactgagtgaatatatccggtcatatgccctcgtgaaaggtacgggagatgacgtcgtcctgctgttctttagtcagcttaataaaattaaccgcatatcccgatacccggacagtgagctggggatagagttccgggtgtttctgggcatccagaagcatctctctgtccagtacattgacgttcagatgatggccgcctttttcagcgtaaccgtctaacagagtgacaagattgtcgatttgctgtgtacttgctttcataattataatcctccagtaagttttcttcttataaatttacgttcgtgtttttcaaatcctcatccagctgtttcaggtcaatatccagtccctcctccagattgggaatccggcatgcactgtccagacagtccagctgcaggtccagatctcctgcgaacactttgtcatcttttcccagagctcccgggattacagtaaaggtattggatatgccgtcctgggcatccataaagggcagcttggatacggatgacagagaggacactgccccccgggcgtctctgccatgcatagggtttgctccgggagcaaagggctcaccggctttccttccgtcaggagtggagcctgtggcttttccgtatactacattagaagtaatggtcaggatagaagtggttggaatcccgccccggtaggtatggttacccttgatatacttcataaatttgcgcaccagttggcctgcgatgctgtctacccggtcatcgtcatttccgtattttggaaaatccccttctacctggtaatccacggctaatccctgttcgttacggactgcttttactctggcatactttatggcagacagagaatctgccaccacagacagaccggcaatacccgttgcgaaccagcgggtcacatctttgtcgtgaagcgccatctgcagcctttcatagctgtacttgtcgtgcatataatggataatgttgagggtattcacatagactcccgccagccatttcatcatatcatcatagcgttccatcacttcctcatagttgagatactcggaagtgatgggacggtatctggggcccacttgcttccccgtgatttcatccacacctccgttgattgcatacagaaggcatttggccagatttgctctggcgccgaaaaactgcatttccttgccaatgcgcatggaagagacacagcaggcaatggcatagtcatctccgtgggtcacacgcatcagatcatcattttcgtattgaatggaggaggattcaatggaggttttagcgcagaatcttttgaaattttccggcagacgtacagaccaaagcacagtaagattgggctccggcgaggtcccaaggttagagagggtgtggagaaagcggaaagacatctttgttaccagaggtctgccgtcaatacccactcccccgatggactctgtcacccaggtggggtccccggagaacaaagcattgtactccggcgtgcgcgcaaattttatcagacgcagtttcataataaaatgatctacaaactcctgaatccgggcctctgtaaaggtacctctctgcaaatcccgttccgcgtagatatccaggaaggttgatgtgcgtcccagagacatggcggctccgttttgttcttttacagcagccaggtagccgaagtacagccactggatggcctcctgcaggttctctgccggccgggagagatcaaagccgtagatgcgccccagctcttctagttcttccagagcccgcacctgctccatcagttcctcccgctcccggattacctgggaatacatgacggtccgggcgctgttccactgatcctttttatcttcaataagcctttgggttccgtacagggcaactctccggtagtctccgatgatccgccctctgccgtaggcatccggcagtcctgtgatgatatgggaagagcggcaggcgcgcatctcaggcgtataagcgtcaaatacccctgcattgtgtgtctttctgtgcctggtgaaaaattctgtgatctccggatctacctgatatccattgtcctggcaggctttctgtgccatccggatacctccgtaaggctgaagtgcccgtttaaagggcttgtctgtctgaaaccccacaatggtttccttctccttgtccagatatcccggaccgtgggaggtaatggtggaaatgatttttgtatccatgtccagtacgcctccggccttccgttccttctccgacaaatccatgacctgtctccagagctgttctgtggctggggaaggtccctcaaggaaggaatcatccccctcatagggggtgtagttgcgctgaataaagtcccggacatcaatttcctgtgtccagtttccgggggtaaagccgttccatgaagtatgcatagtaagtcagcctccttttgcgatatatggtctgtttcagaatttccaattcttgttaaaaatataacataattctctcaagtacagaataccagaagaaatgcctctgcggatgttttaaattgcgtacataaggaaaataatagagaaaaattatcaagattagaaaaaaactggaaatacgcggtttttattctatagtatacccagttcgtgaaagaagttctgaggaaaacacaggtatatttaccagaatttaacaggcacaattatgtatctaatctaaagtacggcattcaccgcacagccgcacacagaactttggcgctctttctttcggtattggaggggcgtacatcccattgcctctgcaaacacatgagaaaagtggctgctggaagagaagccgatgctaagtgcaatgtccagcacgcttttctccgtatggaccagcaggtattcccccatgcggatcctataggcattcaggtattcccccggggactgccggatgaccttctgaaagtcccggcagcattcactgcggctgacacaggcggctttggcaacatcctccagatatattttatggggatattctctgtgaataaactccatggcagactttaccctctgataacataagtctgaaactggagattcccgctccggcacagaagagagattcctgagaagggcaagcccggtccgctgaagaagaatctgcagttcccactgatatcccgcagggcgctcgcagtcacaggcatacatcctgcggatacaggaaaggggttcacggtgccagtctgccgatccgtccagaaggaaaaagtctttcctggcattccacagggcggaggcatatttaccttctaccacacctccggagagtccgtgaaagagatagggatctgccaggacagcacagtattcgcttcctctcatcatctggtagggatagacctggtgaagcaggctggcaggtaccatcccgccctgtccgggtccgatgagataggaaccggaccctgcgtgcagttcaatctgcccttccagcacatagataagctcggcctctttatgccagtgccaggaaatggaacggttcgggtacaaatccagaacatccagatacacttccataggaaatccaggtgttccgtggcaggtcacctcctccagattcccgttgatttcgatataattcagctgcatagtgagtcctcccttcttctatggcacgattctgttatttttagcgattatcctggtagatcctctttacagaaatgattataatgaaaaaacaatcattttacaacagggggaaatatctatgacaaaaagaattgcgctgactctggcagggattctgctggtgtacggatctgtggcatttgccatcaaagccgggattggagttctgcctgtggatgcagccatcaccaccctggcaggccttctgcatatgaaggtggggactttttccatgatttttcatggaagcttttttattgggcagattttgatagaaaagaaaaattttaagaaagttcagtttttgcagatcggttatattgtatttggcggctccattttgaattttatgctgtatacagtgctgggaggcgtttccttttcctggtatccggtgcgccttatagtctgtgtgctggccttttttgtcagtgcctttgggtgcacgctggtgctggagatgaaagtgatccgcactcccatggaaggctttatccagatggtggcagagcagacaggcaccacaatgggacggctgcgccagaagatagacatgggtttggtggtacttacagtggttctcacccttatctttcacacgccctggacactccgggagggcactgtgatcgccgcgctgattttcgggccctttatggattttcacagcagctggatccgcaatgtgctgtacggggcgaaaaagattctaccagaaaactaaaaattatggttgtcaagaaaaaacacttgacaagtgtaaaggtatcagttatgatgtctaaggtgattacacatggaaaaaattgtagaacaggctttgctttatgacttttacggggaactcctcacagaacaccagagaagaatctatgaggatgtggtgctgaatgactattctctcagcgaggtggctgaggttctgggaatcagccgtcagggagttcacgataacgtaaagcgctgtcataagatattgaaagattacgaaggaaagctgcatctggtggctaagttcgaatctgtaaaacataaggtgaatgagattcatcagttgacaaaagactgcgaagcattggacaagaaagaattagcagaccgtgtggaagccatttcccacgagatattagaggagttatagtgcatggcatttgaaagtttaaccgataaactacagaatgtgttcaagaacttaagaagcaaaggacgtctcacggaagcagatgtaaagacggctctcagagaagttaagatggcccttctggaggcggatgtcagttataaggtagtcaaacagttcatgaaagccgtacaggaacgtgcggtgggacaggatgttatgaccggactgaatcccggacagatggtaattaagattgtgaatgaagagctggtcagacttatgggaagcgagaccacagagattgcattcaaaccgggcaatgagataacggtgctgatgatggtgggacttcagggggccggcaagacaactacgacggcaaagctggcaggaaagctgaaagcgaagggaaagaaacctctgctggtggcctgtgacgtataccgtccggcggctatcacacagcttcaggtgaacggtgaaaagcagggtgttgatgtatttgccatgggcgacaagcaaaaacctgtgaatatcgccaaagctgctctggaatacgctaaggttaacagttataataccgtgctcattgataccgccggacgtcttcatattgacgaggacatgatggcagagctggaagagattaagtcaagcctgactgtggatcagaccctgctcgtggtggatgccatgacaggccaggatgcggtgaatgtggccgaaaccttcagtgaaaaggtaggtatagacggagtcgtactcaccaaactggacggtgataccagaggcggtgccgcactttccattaaagcaatcagcggaaagcccattttatatgtgggtatgggagaaaaactttccgatctggaacagttttatccggagcggatggcttccaggattctggggatgggggatgtcatgagcctcatcgaaaaagcccaggccaacattgatgaagaaaaagcaaagcagatggagcagaagattaagaaagcttcctttggttttgatgattatctggaaagtatgaaccagatgaagaatatgggaggtatctccagtgttctcagtatgcttccgggcatgagcgcacagatgggagatatcgagagtatggttgacgagaaagagctggccagaaaagaagccatgatactttccatgactcctcaggagcgggccaaccccgatatcctgaatgtatccagaaagaaccggatcgccagaggcgccggggtggatatcagtgaagttaaccgtatggtaaagcagtttgaacaggcaaaaaagatgatgaagcagatgcccggcctcatgggaggcaaaggcggcaaaaaattcggtaaaagaggcggctttaagctacccttttagatatatggaaaaaaacaaaggaggtgaaagataaatggcagttaaaatcagattaagaagaatgggacagaaaaaggctcctttctatagaatcgttgttgcggattccagatccccgagagacggtaagttcatcgaagagatcggaacctacgacccaacttgtgacccaagcgtatacaaggtagacgaagaggcagctaagagatggttagcagacggtgcacagcctactgaaaccgtaggtaagatcttcaaaatggctggtattgaaaaataagggtctcggaggtgtgtgatgaaagaactggtagaagtaattgcaaagtctctggtagaacatcctgaagaagttgttgtaacagaaacagaagaggatgattctgttttagtagaactgcgcgtggcaccctctgatatgggcaaggtaattggccgtcaggggcggattgccaaagcacttcgtactgtagtaaaagccgcatcttccaagagtgataaaaaggttgttgtagatattctgcagtagccaggtgtcaattggagacggagaatgaaacaggggacagggatgataagatccccgtccttcttttttctttctatacaggacagggaaaacaaaggaacaggtatataatatggaagaattattacaggtaggggtgatctcttccacccacggaatccgcggagaggtaaaggtataccccacaactgatgatgtgaatagatttaaagagttaaaaaatgtaattctggatactggaagggaacagatttcccttgagatccagggggtcaagtttttcaaacagtttgcaatcctgaagttcaaaggaatagacacaatcaatgagatagaaaaatataaagggaaaagcctctgggttaccagaacagatgcactgccgctgggggaggatgagtattatattgcagatctcctggatatgaaggtgtatctggaggacagcagctttttcggaatcttaaaagatgtcatggagaccggcgccaatgatgtctatgtcatagagacagaggatgggaaggaagtgctggtacctgcgattcatgactgtatactgaaagtagatgtagagaacaggaggatggagatccatctcctggagggtctgctttagaggcttaggagggtaagatgaagtttcatgtattaaccttgttccctgagatgatacttcaggggcttaataccagtatcacaggacgggccattgacagcggatatatctctctggaagctgtgaatatcagggattttgctgaaaataagcataaccgggtggacgattatccctatggagggggagcgggcatggtaatgcaggcgggtcctgtctgcaaagctttcgagtctgtagccgggagtatggagaaaaaaccaagggtgatctatctgacaccccaggggagcgtatttacccaggcaatggcaaaagagctggccggggaggaagaacttgtatttttgtgcggccactacgagggaattgacgagagagtgctggaggagatagtgacagatccggtttccataggagattatgttctgaccggaggagagcttccggctatggttatgatagatgccatatcccgtctggtacccggtgtgctgagcaatgaggagtctgcacaatttgaatcctttcaggacaacctgctggagtatccccagtacactcgtcccgccgtgtggagggaaaaagaagtgcctccgatccttttgtccggccaccaccagaatgtggaaaaatggcggagggaacagtcagtgatccgcacggccaaaagaaggccggatctgctgaaaacggcggagctgaccttgtccgagcaagagttggctgaaaaaatacttgcaaaaaaagaagatttatagtataattactagcgttgtgaataaaagagatggtcctctgttacgaaaggtattaagaacatccaaatgagttaaggagagaaaacaaatgaacgaaatcattaagaacatcgaagctgctcagatgaaagcagaagtgcctgagttcaacgtaggcgacacagtaagagtacacggcaagatcaaagagggtaaccgcgagagagtccaggtattcgaaggaatcgtaattaaaaagcagggcggaagcgtaagagcaacctttactgtaagaaagaattccaacggcgtaggcgtggaaaagacatggccgctgcattctcccaacgtagtaaaagtagatgtagtgcgcagaggtaaggtaagacgtgcgaaactgtactacttgagagatcgcgtaggaaagagagctaaggtaaaagaattagtaaaataagaagtaagataacagggacaaatacatcaggtatgtgtccctgtttctgaattatgaggaaaatgctttgaagaaaaaactatttgccggttcaaaaggtccaacagagaataaaaaaatgaagagcatccttctgtgggtgtttgagatcgccgtggttctggttctggctgctgttgtttctattttcttctgccagagcattgtcatgcaggagggatctatggagcccaccctggccacccaggataagattctgatcaataaagtgatttataagataaaagagccccagagaggggacattattgcctttaaaaacagcccggaggatcacgctagcattcatattaaaagagtgatcggtctccccggggaaaagatccagatcaaggacggacagatcctgattaacggaaaaacgtatatggaaaaaaaggattttccccagatatcaaacggaggtctggccgaacaaaccatcaccctgggaaaagatgaatattttgtgttgggtgataatcggaataacagtgaggacagccggtacggcgatgtgggaaacgtaaagaaaaaatatattgtaggaaagctgtggtttgtaatttcccctcggagcaaattcggctttttggagagctgagaggagaaacactgtatgaattttcaatggtatcccggtcatatgacaaaagcaaagcgtatgatgcaggaaaacataaaactgatagaccttattattgagctggtagacgccagagtgcctttatccagcagaaaccctgagattgatgagctgggaaagaataaggcacgtcttatcctgctgaacaaagcagatctggcggacgagcgcgccaacgatgcctggatgaaatattttcaggaaaaaggatattacgtggcaaagataaattccaaagccgggacgggaatgaaaagcctgaacggtataatacaggaaacctgtaaagaaaagctggagagggacagacgaagaggcattaagaaccgccccatccgggccatggtggtgggaatccccaacgtaggtaagtctacgtttatcaatgcccttgcaggaaaagcatgcacgaagacaggaaataagcctggtgtgacaaaaggaaagcagtggatccgcctgaacaaaggagtggagcttctggatacaccgggaattctctggcccaagtttgaagatcagacggtagggcttaagctggctataattggctccatcaaagacgagctcctgaatattgaggaactgtcgctggaactgctggggtttcttggagataagtattccggagctttaaacagccggtatgagattgaagagtccccggacagactgcatatgctcaatgagattgcggagaacagaaaatgcctgaagaagggcggagagctggattacccaaaggctgccggtctgatcctggatgacttccgaagcggcaaaatcgggcggattactctggaattccctgtggaacagacaggagaggcacaggaacagtgaggtttagcagatgagaacagtaggagaaattaaggcggaattcgccgctgcaggggaggagcggaaaagagagctctgcggaatctatggggcggaccccagggccggagtgaaggctctgattcagaaggttaaaaaagacggggagaagctggaagcagagagggcgaggacacgccttatgagtgtatacgaagataaatacggggatctgggactggtctgcggtattgatgaagtgggaagaggacctctggccggccctgtggtggccggggctgtgattctgcccagagacaaggaaattctctggctgaacgactctaaaaagctttctgctgccaggcgggaggagctgtaccatgtgattatggaggaagcggtggcggttggcctgggaatggccggtcctgccaggattgatgagatcaatatcctccaggcaacctatgaggctatgcgtgaggcggtatcgaacctgaaggcggtgccccagatccttttaaatgacgcggttacgattccggagattatcattcctcaggtaccgatcataaaaggagatgcgaaaagtatctccattgcagccgccagtatagtggcaaaggtaacccgggaccggatgatggaagaatatgaccgggtaatgccggaatatgattttgcctctaacaaaggctatggatccgcccgccacatagaggctctgaaacagtatggaccaagtcctatccacagacggactttcatacataattttgtatcataggatcaggatttggaaatcacaggaagcgtatagaactatatgagagaaaacacccgtaaaaccggaacgcagtatgaggagattgcagcccgctatctcacagaccagggatatcgaatcctggcaaaaaattaccgctgcgctctaggagagattgatatcattgccagggacggcaggtatctgtgttttgtagaggtaaaatacagaacctcggtgaggcagggagggcctcttttggcagtgaacagcagtaaacagagaagaatctgcaggacggcatggtattatctgacaggcagggggctgggagagtccgttccctgccgttttgatgtggtgggaatcacgccggaggagatacttctgattaaagatgcattttccttccatatataagagcatgcaggaggataacaggatggtagattggatttggaaagacagtcatatgcccaggatgcaggtgcacgagaagaaaggtgtcatatatcttggctttcaggcactggaggagactggcctggtaacccatgggtttacaacacgctggggaggagtgagccgcggtattttttcctccatgaatctgagctttacgagaggcgatgatccggagtctgtgagggagaattatcacaggattgcagatgccgtgggcttttcttatgatagtattgtctgcacggatcagacacatacaaccaatatccgtgtggcggcagaggaagacagaggaaaagggcttacgaaggagaaggattacagagacatagacggactgattaccaatgttcctgggctggttctgacaaccttctatgcagactgcgtgcccctgtactttctggatcccagaaaaaaggccattggcctgagccattcgggatggcggggaacggtgaacaagatgggaaaggcaacggtagaggccatgaccagggaatatggaacggatcctaaagatattatcgctgccatcggaccttctatctgccaggactgttatgaggtaagcggggatgtggcggatgcttttaaacgtgcatttccccgtgagacccattcaggtatgatacaggataagaagaatggaaagtatcagctgaacctttggaaagccaatgagctggtgatgagagaggctgggatcccggaaaaaaacatttctcttcccaatctatgcacctgctgcaatccccggcatctgttttcccacagggcaagcaagggaaaaagaggcaatctggctgcctttctgcaacttcgtgataattcacagttctaaaaaaatataaattttatgtcaatcagatattaggtcataagtaacaaaaattccatatttatccagcgggatatagactaactgcataaaaatttctaaaatgtaacaaaatgttacgcacatgttacaaaaatgaagaaaaacgctaccttttattaaaaaagtgtgatataatgattccacgttagaaaagtatgggagatttatttatgaagaataaaaaaataatgagcgtatttttggcttccttgatgctgacaggctctgtactaccctgctacgcctctactcaggataaaatctctgataccaaggcgcaaaagcaggagacacaatccacgctgaaccagacaaaagataagatcagcaatctggaaaccaaaaaaggtgaattagagaattatttgacagacttgaatcaacagctttctgatttgagcgacagtctttcggagcttcaggacaaatacgaggacaagcagaaagagctgcaggaagtggaaaaagagctggaggctgcaaaggaattagaaaaagagcagtacgaggccatgaaagtccgcatccagtacatgtatgagaagaataactcaagttatatagaagtactttttgccgctgagagttttacagattttctgaaccgggcagataatattgcgcagatgtcacgctatgacagggacaagctggccgagtatgcggaaacaaaggaacagattgcccagcaggaagagaaagtaaagacagaacagcaggcaattgagacccttcagcaggagagtacggcaaagcaggaagaagtggaagaactggtggcttctacttatgatcagattaatacatatgccggtcagattacagaatctgaatctgaggcaaaagcgctgctggctaaagtaaacagccaggaggaaactttgaacggcctgttaaaacaggcaaaagatgaggaggccgccgccgctctggcagccaagaaacaggaacaggcttccaaggaagccgtacagaccgcatccgtcaaggagagcagcgcgtccaataagcagccatccaaagaggaaagcaaaaaagaagacaccgaaaaagagaatacttccaaagaggagagcaaaaaagaagagacagcaaaagaggattcttcggaggaaagcagttcttcttccaattcctcacaaggggagtatttaggtaaatttaaattaactgcctactgtaactgtgaacagtgctgcgggcagtgggccaacggactgacagcgtcaggaaccacaccttctgagggcagaaccgtagcaatgggcggagttccctttgggacaaagctattgattaacggcaatgtatataccgtagaagacagaggtaccgcatacgggcatgtggatgtctatatgaataaccattccgatacctatggatttggtgtgaaatacgctgatgtttaccgcctgaattaatcattgcaacgtgtgagacgtaaaaaaagaaccgcttcaaaggcggttcttttttgcttatttttcccgttttagcagctgattgattttcttagtggtggagcgaaccttttccacggaaacatcgtggttcagagtatccataatgcttgccaggtatttgctcatatcagcttcaagatagtaagggcgttttagcacctcagggtttctgtaattcagattcgttgtgattactttggagatataccccttttcatagtattcgtcgaacttttccatgccgttggtaaagaggccgaaggtagtgcatacaaatacccgcccggcttttctttctttcagctgtttggctacatccagcatactttccccggaggatatcatgtcgtcaatgatgattacatcttttccctccacggaatctcccaggaactcatgagcgacgattggatttctgccgtctaccactgtggaatagtctctgcgcttatagaacatgcccatgtctaccccaagaatgttggagaagtatacggctcttggcatggccccctcgtcggggctgataaccatcagatgatcgttgtccatgtggaagtcttccacactggaggtgagggttttcaggaactgataggtgggcataaaattgtcaaagcctgacagaggaatggaattctgtaccctgggatcgtgagcatcaaaggttatgatgttgctcactcccatattcactaattcttctaatgccagcgcgcagtcaagggattcccttttggaacggcggtgctgtctgctttcgtacaaaaagggcataataacattaatacggtgtgctttccctgttgcggcagaaatcatgcgcttcagatcctgataatgatcgtccggtgacatatgattttcatagccgcacaccttgtaggtaatgctgtaattgcatacgtctaccataatatataaatctacccctcggatagattccttgtactggccctttccttccccggtaccaaatctggggcattcgcagtccgcaagaaaagagtcctcggagtaaccgtgcagtgtcacccctgatgtattgtgagcaataagctctttccgaaattgaaccagataagaatccacctgtgatgccagttccctgcagccggccaaagctgcaatctttaaaggtgcaaccggaatggatttctccagtaagctgatatcaaccataataacctccgacagtttgtgtgttattttgacagaattacactattttgtcatactatagtagttatatcatcagtgacttgcccccgtcaaggaaattattgcttttttactacaaagttggtatgatataaaagatgaaaggtcgagtaaattatgaaaaaaacaaagcatataatccggcagattgccggagacagtatagcagaagagatgaatctggaacctatggatgaggtgctggccatcaatggacaggagatagaagatgtatttgattaccactacctggtaaatgatgagtatatagaactgttggtgcgaaaggctgacggggaggagtggctgctggaaatagaaaaggatgcccaggaggatctggggattgagtttcagaacagtctgatggatgattaccgttcctgcaggaaccggtgcattttctgctttattgaccagatgccgcctggaatgcgggagactctttattttaaagacgatgattccaggctttcctttttgcagggcaactatgtaaccctcacgaacatgagtgaccacgatattgacagaattattcactaccatctttctcctataaatatatcatttcagacaacaaatcccgaacttcgctgtaagatgctgaataaccgttttgccggggacattttttccaaggtagacaggctgtatgaggccggtatagagatgaatgggcagattgtgctctgcaaagggtataatgacggcaaggagctggaaaaaagcatcggggatctggctgagtacctgccccatctgcgcagtgtttcggtggttcctgtgggactcagccgctatcgggaggggcttacccggctggaaccgtttcagcaggaagatgctgtccgggtactggaaactgttcaccggtggcagaagaagttgtatgatgcatacggactgcactttatccatgcaagcgatgaatggtatcttttggcaggagaggagctccccccggaagaacggtacgatggatacctccagctggaaaatggagtgggaatgctccggctgttggaagaagaggtaacagaagcccttgagagccgggaaggcgacggcagagagaggcatatctccattgccaccggaaaactggcctatcctcacatctgcagacatgtgaggagccttaagaaaaaataccccaatgtaatctgcagcgtatatccggtgactaattttttcttcggagagagcattacggtgtcgggtcttctcactggtcaggatctgaaaaaacagcttacgggccggaatctgggagaagaactgctgttgccctgtaatatgctgcgaagcggagagaatgtttttttggacgacgtgactgtagaagaactggaagggacccttcaggttcctgtaagtgtggtagacactcagggcgcagacttggtggaggcgcttctgggagagacaacaggaagagaacatagaaggagacaaatatatgagcaaaccaatagtagcaattgtgggacgccctaatgtgggcaaatcaacgctgtttaacgccctggcaggccagaatatatcaatagtaaaggatacccccggggttaccagggaccgtatctatgcagatgtcagctggctgaatcatggatttaccatgattgataccggagggattgaaccggaaagcaaggatatcatcctgtcccagatgagggaacaggcgcagattgccattgatacggcggatgtgatcatatttataaccgatgtgcgacagggactggtggatgccgacgcaaaggtggcggatatgctccgcagaagcggcaaacccgtagttcttgccgtgaataaggtagataattttgacaaactgctcatggatgtatatgagttttacaaccttggaatcggggagccatttcctatctcggcatcttccaagctgggcctgggagatatgctggatgaagtggtacgccactttgaggaggaagaggaagaagaggaagaggacgacatcccaagggttgctattgtaggcaagcccaatgttgggaaatcctccattattaacaagctgctgggacagtccagagtgattgtctcagatattgcaggaaccaccagagatgctattgacacgaatattatgtggcaggggcgggaatatatctttatagacacagcaggtcttcgaagaaagaacaagatcaaagaagagctggagagatacagcattatccgcaccgtgactgcagttgaccgggcggatgtggtgattgtggtcattgacgcggtggaggggatcacggagcaggatgcgaaaatcgccgggattgcccacgagagaggaaaagggattatcattgctgtcaataagtgggacgcaatagagaagaatgataagaccatatacaagtataccagtaaggtaagggaattcctctcgtatatgccctacgcggaactgatgttcatctccgcggagaccggccagagactgcctaagctgtttgatactattgatatggtgctggagaaccagactctccggattcagacaggggtgctcaatgaaataatggcagaagccattgctctgcagcagccgccttccgacaagggaaaacggctgaagctgtattacattacccaggtgtcggtgaaaccgcctacttttgttatttttgtgaacgataaagaactgatgcacttctcctatacccgttatctggaaaataaaataagggaagcttttggattcagaggaacctctctgaaatttattattcgagaacggaaagagaaggagtaaggaaatcatggtacgtatcatttgtctggcaatcggttatgtgtttgggctgtttcagacttcttatatttacggaagaatgaacggcatagatatccgggagcatggcagcgggaatgcagggacaacaaatgccctgcggaccctggggaaaaaggctgggattattaccctgctgggagattgttttaaatgtgtgtttgccgtacttcttgtacgggctatctttgggagcagccatccggataccatacggctgttgggaatgtatgcggcggcaggctgtattcttggacataatttccctgtgaatctgggattccggggagggaaggggattgccgcctctgtgggactggtggcatcctttgactggagagtgttacttattgcagcaaccgtgtttttggttctgttttttacgacgcactatgtatctttgagctccctgaccggctatctggcatttttagggagtacgctggttatgggacagatgggactcttccatatgcctcaggcggagctaagggagctgtatgtggttgtggcgcttttggcatgtcttgccttctaccgccacagggaaaatattgtaaggctgatcaggggaaccgagcgaaggacctatctgaacagtaagagtgaaaagtaaaggggtgatcatatggcaaaaatcagtgtacttggagcgggaagctggggaactgcactgtctgtcctgctgtgcgacaacggacatgaggtgattctgtggtccaggaaaaaagaggaggcagatgagctcagggagaagagagaacatgtgtcaaagcttcccggagtgaagcttccggacagcatgaggtttacttctgaactggaagaggcgctcccgggcagagatcttctggttatggcggttccatccatcgcggcccggggactggcccgcaggataagttgcgggctgccggagggacagctgattgtaaatgtggccaagggaattgaggaggagacgcttcttactttgagcgagcagattgaagaagaaatcccccaggctgacgttgcggttttatccggccccagccatgcggaggaagtggggcgcaaactccccacaacctgtgtgattggcgcgcaccacaaggagactgccgagattctccagaatatttttatgagtcccgtattcagagtctatatcagcccggacatcctgggaattgagctgggagcggcgctgaaaaacgtaattgccctggcggcaggaactgcagacggacttggttacggcgacaatacaaaagcagctttgattaccagagggattacagaaatatcccgtctgggcattgctatgggggcaaaggcagataccttctacggcttgtccggaatcggggatttgattgtaacctgtgccagtgtccacagcaggaaccggaaggccggctatctgatcggtcaggggaaaaccacggaacaggctatggaagaagtgaaaatggtggtggaaggcgtgtattccgcaaaggctgccatggggctggcagagaaatatcaggtggagctgcccattatttcccaggttaataaagtgctctttcaggggaaatcccccggggaggcggttcaggagctgatgcttcgggataagaaaatagagtcctgggacagcaggtgggaagaaaaggtgaattgacaatgaaagacggtgtatccgcagatgcaccgtcttttaatgtccgaaaacttagattattattttgttaggatttcatattgacccaggagatcttctgggatgctggcagtgcgctgctggcggtccagagcgttcagcgcctccatttcttccggggtgagggagaagtcaaagatctgtgcattgctgtagatgcgatcttttttcgaggatttgggaatgacggatatgccctgctgtacagaccagcgaagaccgatctgggctggggttttgccccggcggacggcgattcgggcgacagtctcttcgtctaagtaggcccctcgtgcaaggggagcgtatgcctgtaccgcgatgtggtgtgcgcggcagtaagaaagcagctccgggtgattgaaaagcgggtggaattctatctgatttacggcgggtacaatgccgcactgctcgttcagcttttccagatcctgaacagaaaagttgcttaccccgatggatttggcgcggcctgaactgtatatcttctccagcgctttccaggtagcgatgtaacagcccgccaccggccagtgaatcagatagagatccacgtattccagccccaggcgctccaggcttcggttaaaagccccttctacgtcgttcatacgctgggcgttattccagaccttggtggttacgaataattcctcgcgctttacggaagcagctttgatcccccgtcccacaccttcttcgtttttatagacagaagcggtatctatgaggcggtatcctgcctccacggcccagcagatggcgttctctacttcgttgttcccggttgctttatatactcctaagcccaacatcggcatttctctttcgttattcagtataattgaatgtgtttctaaggacataccatccctccttatattatattcttgtgcagtatatcacaaaattatgaaagaaatgataggtatttattaactttttaataaatccatggtactatgagggtggatggccggtgcagagtaattgctgcaccggaatgcatttgcagcaaaggaggctgtctatgagattttttcatatcgcagacttacacctgggaaagaaacttctgggggaaagcctgctggaggaccagagagacattctggagaaagtattactggagataaaaaaggaacggccccagggcattttaattgccggggacatttatgataaaagcattccctccggggaagccgtggtactgtttgattcttttctggaaaggctggcagaatccggtcttgacatatttatcatcagcggaaatcatgattctcctgagcgcctggacttcgccagaaaccttttggctaagaataaagtgcatattgcagggggatttaaaggagagcttccccatacagtgctctgtgacgagcggggggagctcactgtgtggcagatgccttttatcaagccggcagcgctcagaccttactttgaagaatcccctgagacgtatgaggaggcggtacaggcggtgcttcggacggctgagattgacagcgggaaaagaaatatccttttagcccaccagtatgtggtgtggcagggggaaaagcctcttccctcagactctgagcagctgtcgctgggggggctggaacaggtggatgcctcctgctttgacgcttttgattatgtggctctgggacatattcacaggccgcagaagattggaagaccggaagtgcggtacgcaggttctcctctgaaatattcattttcagaggttcatcataaaaaggcagttacggtcgtagatatagaggagaaaggacaggtatccctgcggaagctgcctctttcgccgcttcacgagatggctgttctcaagggaacaatggaggagctgaccggggaagcgtacagagagtaccggaacggttattatctctcggtcgttctgacagacgaacagccggtggaacagcccgtagagaggctcaaggagtattttccagggcttctggaatttgccattgataatgcaaggacaagggagcgaaaggagagcggccttaagacggagcagattttactgcgcacgccccgggaattatttcaggagttttataagaagcagaaccacgtagaaatgtctccggcggagaataggattctagaggaagtgctgcagagagtaggagaacatgtattatgaaacccacagaactgatgatgcaggccttcgggccgtatgctgaccctgtaacaattgattttacacccttttaccgtcagggtttgtttttaatcagcggcgatacgggggcaggaaaaactactatttttgacggaattatgtatgccctgtacgacgaaaccagcggcagcagcagaaaagcggaaaatctgagaagtgattatgcggacagcaaaacccttaccagggtccgtctgaagtttttgcacaaaggcagggaatacgaggcggagcggtacttttcagagacacggcgggcagaggcagtccttacgctccctgacggcagcgtgattaccggaaagaaaaatgtgaatcaggctgtagtggatttgctggggctggattaccggcagtttaagcaggtatctatgattgcccagggcgaatttttggatcttctctttgccagaagtgatgtgcggggcgaagtgttccgcaaggtgttccgcacggaatattataaaacagtatctgacttgttaaagagtatggctgcgcatgccagggaagaggaacggtatcggcaggaaagaaaaaaacaggtgcttgaagggctcccggcgtctctgggggaactcccggagggggaactggcccagggtctggaagaacttctggaaaagaaccggaaaaaagaccagaggctgaaaaaagaagaggggatgctggagcagaggagggaacagctgcttcgggaatatgagcgggtcaagctggagaatcaggaactgaaacggcttggagaactgcgggaacggctggagggcaagaaagaagaggcggttctcatgaaagcactggagaagaaaagaagagacgggcagaaggccgtgacgtatgttaagcctctgctggaacagcatgagcagagaatcgccgagctggagggtctgcagagtctgtatggtgagttcaaagagagaaaaaaagaactggagaaagaaaaaaagaactgggagaggatggaagagctgaaggagcggcaggaaaaggaaaagcaacttctggaggatatggaacagcagctggattactggaaagaaaaggagacagaggccagggctgtcataaaactggaagaggatcaggccgcactgaaggaagagctggaacagaggattggtgaagtgaatcagagctcagtaaagtatgagaactacagggctgattttctgaaaagccaggccggaatcctgagcagaaccctgcgggataaaagtccctgtcccgtgtgcggctctctggagcaccccgcgcccgcgccccttctgcataaggatgtgaatgaggaaaccctgaggaaactggaagccaaaaaggacgcattgcagaaaaaaatgcaggaaacctttcacaaatgcgctctgaatcaaaaagagtgggagatgcgaaagggccagctggagcaggtgcagggccttggaagaaagaaggacggcggggctatgctcccctggatccagaaaaaactggaagaacagcaggtcaggataacgaaacagaaatccaggatccgaagtgatgtccctgagagcagagagataaagaaccatctggaagagactacaaatgaataccatctgtgtctgggccgcctggcagagcaggagaagatgcttccccaggccaaagaggctgtaaagtgctccagacagacgtacatgaaccaaataaaaaaacagggctttggaagtgaaaaaattgccagagaggctttctgcacccaggaagagctgggagagctggagaatacggtccgcagatatcagcaggagatgcaggagcttcaggtgcagatccgcagtctcggaaaacggctgcggggcaagatgtaccgggaagaggattattaccagaaaagtctgggggatatggacagccagaggaaagcaatttccagagagagaaagcagatttacaatgacatacgccagctgacgcagctggagaggcagctggaacgccttgaggaagagagcagaggcagtgaggaataccggataagccttcagaccctttccgatacggccaacggcacgttaaacggcaagcctaaactttccttggaacggtacgtgcagtctgcctatttccggatgattgtggcagaagccaatataaagctggaaggaatgaccaatggccgctatgaacttttggtcagagaggagaccagcaaccggcagagtcagattggcctggatttggatgtgtatgattacaatacaggaaaggtcagaaccgtgaaaaccttgtccgggggcgaggcttttaaagcagctctggctcttgcgctgggagtgtcggctgtgattcagagctttgccgggggtgtatgggtagagacaattttcattgatgaaggattcggaagcctggatcaggaatcgctggaacagtccatagccactctggccaccctggccgacggcaaccggctggtggggattatttcccacgttaatgagctaaaagagcgcattgataaccagatacaggtactcaaaagcaaaaaaggaagcagaatccgttagtttgttaattgataaacaaagtaaaattggatatttttagtttacgtcaaattgtttagaaataaaaacaatattaagatttttttataaactttccaataagaatttcttgctaaatatttggaaacaagttataatgaaaacaattgataaataattgtcacaaagtttgtcttgagtggatttagctatggaaaggagaacataagacatgcatttagtgaaagacgagaatggtcatgttatatctcatgcacatgatggtgaacatactcatgaacatgttcacgctgatggaaatgttcatactcacgaacatacgcatgaaggggaacatgaccatgttcatgctcatggatgtgattgcaggaatgagaaatgcaatggcagctgtgcagatgagactgcagctttattgaactatatgcttcagcataatcagcatcacgcggaggaactggatcagatggccaaaaatcttcgcaaattaggcatggaggacgcagccagaaccattgaagagggcgttgcggacttccagaagggcaatatgcgcctgagccttgcactgacactggtaaaagagcatcagaaggaggcataattatgtgtttggcaactgtacagaaaagtgatgacactgtgatctgcagaaacatcagccgtattgatgtggacggggataaagtgatcctgcgggatatcatgggagaagaacaggtgatagaaggcaggattcttatggtagacctggctaacagtattgttaagctggactgccggtagcagcacgggcttttgggcgaaagccctgaagataaaagcaaatcattaaaagagagtggaggataaaagatggagaacagattatgaaggtgtaaaggaacagcgacgtaggacgtgcagggggaatcagctggtaccgctgtaagaggatgggcggtatccggggatgccatctgtatgcatggaacaagtccgaagctgtctcacaaaactgcggcgacgcaggggtgggaacagtccgggacagagactagattagatagaaataggaggtgcccgtaatggcacatgtaattgctgtagccggtaaaggcggtgtgggaaagacaactttatgcggattattaatccagtatctgggggaaaagggaaaaggtcctattctcgctgtggatgcggatgccaattccaatctgaatgaagtgttgggagtagaagtggaagctacactgggagatgtgcgggaggagattgcgcaggcagagcttgcaaaagagaatccgattcctgcaggtgtctctaaagcggattatgcggaatttaagtttaattctgcactggtagaggatgacgattttgatctgctggtgatgggaagaacccaggggaaagggtgttattgttatgtgaatggccttctccaggctcagcttgccaagtatcagaaaaattatccttatattgtagtggacaacgaggcaggtatggagcatatcagccgcggagtgcttccaagcatgcagaccgctatcctggtcagcgattgttcacggcgtggtgtacaggcggttggccggattgcaaaattaattgaagaatgcggcatgaagcctaagaccatcggtttgattgtcaaccgtgcaccgaatggagaactgaatgaaggcacaaaagaagagattgaaaagcaagggctaactcttcttggtgtggtaccacaagatgagagcgtatatgagtacgactgcgacggaaagccaacagttgaactgcctgaaagcaatccggtaaagaaggctctgcgcgatattgtggacaaattaaacctgtagtatttggaaattcccctcttgcaaggtgaagtaattgctgctctgtgtgagagaggtttttttaaacaaaacaataacccctgggggcggatgggttacaagcgctcaaaaactaagagttaatttaaggtaatgctctaaaaggaggatattaatgagtgaattcaaattaaccacagtagaagaattcgaagcggctaccgcgagactgttggagacaggtgcaaaagttggtgcagattcctggcagttaagagttaaaaatcagacaccgcactgtaagttcggtgaggagggtgtctgctgtagaatctgttctatgggaccttgccgtattacaaaaaaagcaccgagaggaatctgtggatgtgatgtacatggtatcgtaggaagaaacttccttcgttttacagcaggcggatctgctactcactctgaccatggacgtgaaatctgccatacgttatatgagacaagagaaggcggaaactacacagttaaggatcctgcaaaattaaaaagaattgctcaggaatggggcattgagacagaaggcaaagatatctacgatctggctcatgaagttgcggaaacaggtctgttagaatatggtaaaccattcggaacacagaaattcatcaagagagcgccggagcatacacaggaaatctggaagagagaagagattgaaccaagagcaatcgaccgtgaggtatctcaggcattacatatgactcatatgggatgttcttccaagccggaagctttggtaagacaggctcttcgctgcggtttatctgacggctggggcggttccatgatgggaacagagttctctgacgtattattcggaacacctaaggaaatggaaacagaagctaacttaggtgttatggaagaggaaaacgtaaacatcgttgttcacggacatgatccttcactttcagaaatgatctgtgaatatgctgaagatcctgaaatgattgcacttgcaaaatctgtaggcgcaaagggaatcacaatctccggtgtatgctgtacctctaacgaagttgcaatgcgccgcggaattcctatggcaggtaacttcttacagcaggaaaacgttgtgcttacaggcgcctgtgaagctatcgtagtagacgttcagtgtatcttcccggcattaggtccattaagcaaatgtttccacacaaaattcatcaccacttcacctgtagcgcagatgccggaatctgactttatccgtttctcatctgagtccgcaggagaaaatgcaaaattaatcgttaagacagcaattgagaacttcaaaaacagaaatccggaattagttcacattccagacatgaaacagaaagcatttgtgggatattccttcgaggaaattatccataaattagacggtgttaccaactccttcgttgacaagacaggaactacaatgccgctggttgactgtgtgaaatccggtgttctcaggggtgcggtagctatggttggatgtaacaatccgaagatcagacctgacgctgctcacattgaattaatgaagaaattaattgccaacgatgttattctcattgtatccggatgttctgcacaggctgctgcaaaagcaggtctgatggacaagagagcaaaagatctctgcggcgccggcctgaagagagtctgcgaactggcagatatccctccggttcttcatatgggatcctgcgtagatatcagccgtatgatgattcttgcatctgaaattgcaaaagattccggctggaatatttcacaggtacctgttgtgggatgtgctcctgaatggatgtccgaaaaagcggtatctatcggtaactacgttgtatctaccggtattgacacttatcttggcgttgaaccttatgcaacaggatccagcgaagtggatgctctgctcaagggcggattaagagactgggtagaggcagcttatactgtagaatcagatattgataaattaggcgatcttatgattgaaagaattgaagaaaagagagctgcgttaggtatctaacagcttctcaaaatcgtgtaatagaaaggtgaatagacatgaaaattgcagtaacgggaaagggcggagttggaaagacaacttttgcggcgacactggcaagactttatgctgaagaaggcagaaaggtgctggctgcagatgtagacccggatgcaaatcttgggctggctttaggattttcagaggaagtcctggattctattgtaccaatctcaaaaatgagaaaactggtagaagagagaaccggagccagcaacgacaataaattttacaaactgaacccaaaggtagatgacataccggatacctacggaaagtcctgcaacggagtgaagcttcttgtgcttggaactgtagagactgggggcggcggatgcgtatgccctgagcatgtgatgctgaagcgtattttaaataatatggtgctccacagagatgacgtggtaatcatggatatggaagccggcctggaacacatgggacggggaactaccgaagggatggatcagtttatcgttgtcattgaacccggagccagaagcatccagacatacaagaatgtgaagcgtctggcaaaagacctgggcgtaaagcaggtgcgtgtggttgccaataaggttcggggcgaagaggacgaggaatttatcaagagcaagatcccggctgaggatttacttggttttattcactacaatcaggaagtgattgacgctgaccgtcagggtaaatccccctatgatgtcagcaaaacagcaacagaagaaattataaaaatcaaagatagaatcgatcaggatcaatgatctgataggaggtataacagtgttattatttgatatcgtatttaatggtaatgatgccatgtatgaagaagcggtaaaagcatgcgatgacgctattgcaaaatacggtgaggacaaggcagttggtttccctgagactgcttacagcttaccatgctattactcagagacaggtaccaagatctctacattaaaagaaatgaaagaagccctgggatacatcaaatctctcatgacaagagagagacgtctggacagcgcgttccagtcaggtgttgccacagcactttccgctgagtttatcgaggctttaaaatatattgatggtgctcagccatatgaactgccatacgaaggacacttttctgatgccaagatccgtgaactgggcgtgcccctggtaacaggcgatatcccgggtgtagccgttattatcggtgaagctcccactgcacaggaagcagtagacctggttaagagctatcagtcacagggtatctttgtggctctggttggaaaatgcatcgagcagatcaaagagctgggttataagactggtttcaacgtacgtgtggttcccctgggcgaggatattgcttctgtaatccacattgtatctgttgctttaagagcagctcttatcttcggtaatgtaacacctggtgacagagcggcattacagaaatacacatttgaccgaatctttgcttttgtcaacgcattcaagaatctggacgagaagacagttgcctgcggcgcaggggctatctactacggtttccctgttgttacaaacgacatggattacacaccggcagtgcctaagagcttgatcaaatacgaagatgtttctcagttcaatccgatttctctggaagccagaaacatcaaactgaaaattacaaacattgatattccggttgcttttgcatccgcattcgaaggcgagattatccgccgcggcgatatgcagatcgaattcgacggttccagagttgactgcttcgagttagtgcagactaaagaactttcagaagtagaagatcacaagattgaagtgattggaccaaagatcgacgatttcgaagttggaagcaagcagagtattgcttacgttgtggaagtggcaggaaagaacatgcagtctgactttgagcctgtatttgagcgtaagttccacagctacatcaactgcatcgaaggtgtaatgcacacaggccagagagatatgatccgtgtgcgtatcagcaaggacgcccatgcagctggatttgaactggagcatatcggtgaagtgctgtatgctaagattaaaaatgaatttgacgctgttgttgacaagtgtcaggttaagatttacacaaatccagaagactgtacaaaactccgtcatgagttagcaatccctgcattcgacaaacgtgatgcaagacttctgactctgaccgatgagtctgttgacgtatactacagctgtatcctctgccaggcattctctccatcccacgtatgtgtggtaacacctgaaagacttggtctctgcggtgctgtttcatggctggatgctaaagctaccaacgaactggatccggctggtccatgtcaggtaattacaaaagaaaaatgtatcgatgaaagaatcggtgagtacgaagatgttaacgaagcagttcgcaagttctcccagggtgctctggaagacgtatctctgtattccattatggaaaaaccgatgacatcctgcggatgctttgagtgtatctgcggtattgagccattctccaacggtgttatcattgccaaccgtgagtattctggtatgactcctcttggaatgactttcccagagctggcttccatgaccggcggcggtgtacagacacctggtttcatgggacatggtaaacacttcattgcttccaagaagttcatgaaggcggaaggcggtatcgaaagaatcgtttggatgcctaaggaactgaaagagacagttgctgaaagattaaatgcaacggccaaggaactttatggaattgacaacttcacagatatggtgggtgacgagacaattgctgaagatcccgagacactggtagcattcctgacagaaaaaaatcatcctgcattaagcatggatccgatgatgtaattctatagtgaacttgtaggacaattagcattgccccttcgggggcagtgctaaaatcgcaaaggacttggattggagatgagaatttgttaattaacagaatctttaacggaaatgatgcggtttacgggttaacagtgggagctattgacgatgcaatagaaaaaaatggggcagataaggcagtgggatttccaaacacagcctattgtctgccgtgttattatgctgtaacgggtgtaaaagtcaagacactgggagatttgaaagaagctgtcggtgttgtgaaaacactaatgacaagagaacatgaactggatgatgcgctgatgtcaggggttgccactgcactgtgtgcggagtttatcgaggctctgaaatatgtggacggagcagttccctatgaagaaccctgctacggtcatcttgcagatgcagtgatccgcgaattgggtgtgcccctggtaaccggggatatcccgggtgtggcagttgtcctgggaagtgctcctacggcaaaagaaggggttgaccttatcaagagctatcaggcacaggggattctggtaactctggtaggaggaattattgatcagtgcgaagaactgggatataagacaggggcgaacgtccgtgttattcctctgggaaaagatgttacatctgttatccacgttgtatccgtggctattcgtgctgccctgatcttcggaaacgtaactcccggggacgcaggtgctcttctgtcttatactgcggagagggttcctgcatttgtgaacgctttcgcacccattgacgatgtgattctggctgcaggcgcaggcgcaatcaagctgggatttcctgtgatctccaacgagacagaaggaatcgcagaggttccgggcgcactgatccctgcaaaggtggaggactttaataagacttctctggaagcgcggaatataaagattaagattacaaacattgatattcctgtagcctttgcctctgcttttgaaggagaaattatccgccggggcgatatgcaggtggaattcgacggctccagggtagactgttttgagttagtgcagtctaaagatatggaggagatcgaagatcacaggattgagatcattggtcctgagatcgacgagttccctgaggggagcaaacagagtattgcttatattgtagaggtggcagggaaaaatatgcagccggactttgagccggtatttgaacgtaagttccacagctacattaactgtattgaaggtgtgatgcatacaggccagagagatatgattcgggttcgtatcagcaaggacgcatatcaggcaggttttcgtgcaaaacacattggtgaagtgctttacgcaaaggtaaagagtgagtttgaggcagtggttgacaagtgccaggtaaagatctatacaatgccggaagactgtacaaagctgcgccatgaacttgccgtacctgcatttgacaagagagatgacaggctgcgcaatctgacagatgaatcagtagatgtttattacagctgtattctgtgccaggcgttctcgccttctcatgtatgcgtagtgacgccggagagactgggactgtgcggagctgtgtcctggctggatgcaaaagctaccaatgagctggatcccaacggaccctgccaggtaatcacaaaagaaaaatgtattgacgacagaatcggtgagtttgaagatgtgaatgaggcagttcataagctgtcccagggggcgctggaagaagtgtcactgtattccatcatggaaaaaccgatgacgtcctgcggatgctttgagtgtatctgcggcattgagccattctcaaacggcgttgtgattacgaacagagagtatgcgggtatgactcctcttggcatgactttcccggaactggcttccatgaccggcggcggtgtgcagacccccggctttatgggacatggaaagcactttattgcatctaagaaattcatgaaggcagagggcggaattgagagaattgtatggatgcccaaggaattaaaggatatggtggcagagcgtctgaatgagactgccaaagagctctacggcatcgataatttcaccggaatggtggcagacgaaaccattgctcaggatcccgaaacccttgttgcatttttgacagaacaaggtcatccagccttgtcaatgaaccctatgatgtagtataattattttacgagagtgtgcgtgtatttctatcggcgtacgcactaaaattattaaaggaggctaattaaaatgccgtttaatcaaaaaccacaaaagttcaatgcaaccattaacacagttgagattggatgcggggaaaaagctatcaaattaggtggagaaagtgtatttcctttctacacatttgacggcccaatagacaatgcacctaaggtaggtgtggaaatctctgatttaggactgggagatgctgttccgggactgaaagaattttatggagatgcagcgacacctgctgagatggcgaaaaaagctgaagctatggaaggtgctgattttatctgtctgcgtttggaaggcggagatccaaacggagagaacaaatctgtagaagagttagttgcagttgctaaagaggtggcagatgctgttacctgtcctttagtagtagaaggctgcaagaacgtagaaaaagatgctgacttattagccaaggtagcagacgcccttcagggaaagaacgtactgcttctctctgcgagagaagagaattacaaagcagtaggcgcagctgccggacttgcttacaatcagaaagttggtgctgaatcagccgtagatatcaaccttgcaaaacagttgaatgttgttacaacacagttaggcgtaaaagctgagagtattgttatgaacgttggtactgcagccgcaggttatggttatgaatacgtggtatctaccatggacagaatcaaagcagcagcattatctcaggatgatgctatgcttcagatgcctatcattacaccagtagcagatgaaacatggaacgtaaaagaatccatggcttctgaagatgatatgccagaatggggttccaaggaagaaagaggtattgccatggagatcatgacagcttccgctgacttagcagcaggttctaatgcagttatattaaaacatcctcaatctgttgcaaccatttcaaaaatgattaaagaattagtataatcggaagaacaggaggataaaatattatggctttatcaggtattcaaatatttaaaatgacaccaaaaaccaactgcaaggactgtggttcaccaacatgtatggcattttctatgaaggttgcccagggcgctgtagatatctcagcctgcccgcatatgtcagaggaagcgctggcttctttatctgaggctaccgcacctccaatgaaaacaattaaggttggtaccggagacggtgaatatacattaggtggagagactgttctctacagacatgaaaaaacatatgtaagcaagacaagatatgcggtatctctgtgcagcggcatggatgatgcagccatcgaagctaaattagctgagattccaacggtagactatgagcgtatcggcgaaagaatgtacgtggaaatgctctatgttaattactctgaagaagccggacaggacaagtatgtggctttggttgaaaaggcaaacgctacaggaagaactttggttctgggatgtaaggatccggaagtggcaaaagctgctttggcagtatgcaaagacggcaaaccagtattaaacggcgctgacgcttctaactatgaagcaatgaatgctgttgctgctgaggcaggcgttgttctcggtgtaaccggagctgacctcaatgaattatatgatacagtagcagcacttgaaaaattaggaaacaagaatctgattctggatgttggatgtgcttctgttaaggatgcattcgcagcagccgttcagatcagaagagcagcagtgaaagatcaggacagaaccttcggttatccttctcttgtaaatgttgcaaaattagctcagggagataagtatttacagcaggctctggtatccttattcaccatgaaatatggttccatcgttgttatggaagaactgggatatgcagaagcacttccgttattcggcttaagacagaacgtatttacagatcctcagaaaccaatgaaggttgagcctggtatctacccaatcaacggcgctgatgagaattctgtctgcctgacaaccgtagactttgctcttacatacttcatcgtttccggcgagctggaaagatccggagtaccatgcaacttattaatcagcgatgccggcggattatccgtactgacagcttgggctgccggtaaattatcctccacatctgttgctaagttcatcgctgagcaggttgaagataagattaaatgcagaaaactggttatcccgggtaaagtagctgtattgaagggcgatattgaagcaaaacttccgggatgggaagttatcgttggtcctttagaggctgttcagttagttaagttcttaaaagatatgcagggctaataggacaggcttatctgcatgaaagcaccccggatctgcataatcccggatccggggaatgaaatataatttcttacatgaaaaggagaatgagcatggcaaaatttattacaattggggaaagaattcactgtatttcaccagcaattcgtgaggcaatggcaacaagaaatccagaggctattttaaaacgtgcgaaagagcagttagaagctggagctacatacttagatgttaatattggacctgctgagaatgacggtgaagatttaatgaaatgggcagttcagctccttcaggaaaactttgacaatgttccgttagcactggatacagctaacaagaaagctattgaggcaggtatttctgtatataacagagcaaaaggcaaaccaatcgttaactccgctgacgccggtgacagaatgggctacattgacttagctgctgccaacgatgccattgtaatcgcactttgctccaatggaccaatcgctgcagacaatgacgagcgtatggtacactgccagactatgttagagcatggtatgatgctgggcatggaaccaacagatctgtggtttgacccattattcgtagttgtaaaaggtatgcaggacaaacagatggaagttctggaagctatcaagatgttcagcgatatgggtctgaactctaccggtggattatccaacaactccaatggtatgccaaaacacatcagaccaatcatggactccgcaatggttgctatgtgtatgatgcagggtctgacatctgcaattgttaacccatgcgacgtaagattaatggaaaccatcaaatcttgcgatgtattcaaaaataatacattatatgctgattcttatctggaactgtaatatcggggttttggtataagaatagggaatttatataggtgagtgatctagccgctgtgaagcaggtaccttatagggactgtggagcagcggcttttttgaaagcagggacggtgagaggaagttccaggatgttggctatttatccaaaacatcgagtcatcaatagtgggaaacaagaggaagagtgtacaacgttcgaccttccccacccgttttccgtgaatgtgaagtgagtctctgccaggtcaagggaggaggtcttggggccaggggtactgggtggatctgcgcagactgcggagtgcgtccgaagatccactgccggcggtcacttaggagcgaaggctctcctgagcttcttagtgaacggccaggcagttagctgaggagaaacgcagcagcaagcagatccacccagtacccctggccccaagacctcctcccttgaccgtccgtctgcaacgctgcgctggccgactatgttaccccgagctttacatacacaaaactatcattttagtaattttgaataaatacacctcctgtttcaatcagaaaaagttacaaagtttttatacagcataaaaatgaattagaaatattaattttgcaatgataaaatataagtaagtcaaagaaaaggaagtgtatgaattatgagaagaattacaagtgcatgtctcctgcagacgatgaaatttgacacaatgaatgatgccaatccagagcaggagttagaaattttctgcagtaagctggacaaaaagggaaccaggtattccattgagagtaaggaaaaacaggcggatggttctattgttgtgaggcttaggaagcagtataattcttacaagactgacggatacctggattgattatgtggcagctggaggtgtgacaggaatatatggttggtgcacaggtagtacataagaaatatggtaagggaaaagtgctggaggcaggtgtttcccatataatggtgaggtttgccggcagcgagattcccaaaaagtttgtttatccggatgcctttaagaaatttttgctgtttgaagaccctgtgttggagaaaaaagcgatggccgatatagaacagagggaaaaacagataaaagaagaagaagagaagaaacttatcgagtttaaaatgtttgaggaggagagaaaaagaaagcagctggagcagctgaaaaagaagaggaaagcggccagagcaagaaaagaaaaggagctgcgcgagttagagaaaaaagagaagctgcggttagagtcagagcaggaatctggataagagaacggcgcccgggaaggcctgggcgccgctctcttttttgctttgtaaagtgcccttttgcttgacagtaaaggggtgagtaaggtatatttatattgacaagcatttgtcaatctgacaaaaaattgctggtcaattacagttgttgtagcttggttcaggcgaacatacataattgtaaaattatattgaagaaaggcgaatgaagctatgtttcaggtaacttttagattcgagagcggtgaaaaggtcacgacttacgctcaggaaggggaaaaccttctggaaacagcaagaaaggcaaatgttgccattgatgccccttgttccggtaatgcatcctgtggaaaatgtaaagtgcggttaatcagcgggaagttagactcccagaagacgcgccatatctttgaggaggagtacgagcagggttggaggctggcttgtgtcagcaagataaacggcgatgtggaagtggtagttcccgatattgcatcggcatatcgaagcagaatgaaagttgcggatttaagctcaaaagaagagatcgccatcttcgagaaagcaaaatcagacatcgaacaggccggtattgtcctcaaaaacagtttgagaacggtagatgtgtgtatgaatgtacctaccctggatgacaccatgccggacaatgagcgatttaccagggcgctaaagaaagagcttggactaaatagtgtccggattccatattctgcgttgaggaaaatgtcccatgtgttccgggaaagcgactttaaagtaaaagccgtgatacgggtagccagtgacgatgcctttgtatatgatatttatccacagactgagaaggttgtaataggcggactggccatagatattggtacaactacagtatctgctctattgatcaatatgctgaccggcgatgtaatcggcaaagcttctgcaggaaacggacagatccgttacggcgcggatgttattaaccgtattattgagtctgtgaagcccggcggcagcgagagactgcagaaggcgattattgaagaaacgattaatcctatggttcaacagatgtgccgtgccacagggtttgatccccgccatatctacaggatgagcgtggcatccaatacaaccatgaaccatttactgacagggatgaatggggatcctattcggatggaaccttacatccctacattctataaaaccaattctctgtatgcttctgatttgggtattacagtgaatccggatgcccatatcattatggcaccgaatatcggcagctatgtgggcggtgatattactgcaggcactttagtgagtatgatctggaaccgtccggaattttctcttttcattgacttgggaaccaacggagagttggtattcggaaatgaagactttttgatgagctgtgcctgttctgcaggtcctgccttcgagggcggagacatcagctgcgggatgagggccacggatggggccatagaggcttgcaccatagatgcggaaaccatggaacccagcttccatgtgattggaaaagaaggaactaagccgatcggactctgcggttccggcatcattgatgtcatcggtgagctctaccggacaaaaattattaatccaaagggcaagtttatcagaaacggcaaacgcgtccgccacgataaatacggaatgggaagctatgtgctcgcatttgctgaggatgccgggtctgtaaaggatgttgagatcaacgaagtggatattgacaactttataagagccaagggggctatcttctctgcaatcaggacaatgctttcttcggtggactttgatatatccatgattgaagatgtatatgtggcgggtggaatcgggagcggcattaatatgggcaatgcagtccgaatcggaatgtttcctgatattcctctggacaaattccactatattgggaattcttctctgtcaggctcctatgctatgctcttgtctacagcggcagagaaaaaatgttatgaaattgctaagaatatgacttatctggaattaagtgcagttccgacttatatggatgaatttgttgcttcttgctttataccgcatacagatgcagctttattcccatccgttgaactcactggacagaatcctgaataatctgaggtgatatatgaattttgattacgcaaaagacagtaaagaacaacggccgtttgaatactatttcaagaaataccagagtatggatccggcggagataagtgagagaaccggtataccatacgatgaagagaataaattttttatacttcgtcttatgggaagcagctatgagatttcctacccggaatatgaaatcagacacagggaggatactgtcggcagttatcccctggagacggccatgaatgccaagatcctggcacttcgttatctggtggagggaaacagagcaccctctgccggcgaatatctcacatatcgggaggttccctggggagaattctattttagaaattttcaggggagatgcctggcaaggctggcatttggttatgggactaaaattaccagatttcaggaaattatggagcatctgggggcaaaaaagcttgatctgggagatgcttcctatgaatttgaatttatgaatgacttgtttgtacggtttatcttgtgggaaggggatgaggaatttcctccgtcgtcccagatactattctcagataattttcccattgctttctccgcagaggatatggcggtggtgggcgatatttctatcggccttttgaaaactttggagaaacagcagtaacttttcctgccgatcgaaacatccttacggatgctttgataaattgtaacttgtcaaccatgatatagtagagtaaatattgcgcgtaaagtgccttgggatgggaagttgcccttggacgaaggtggccgtgaaattctaccacgatgtaatattgcatccgctactgcattaaagagtatgatgtattgcctctttggtgtagatctactatacacctgaagaaggcctttgtatgcctaaggaggaacatacatcatgaaaaaactgaatagcagagttatcgcttttgccggtgtattgattgccatgaatattattctttccagagtggtggcaattaacattggaagctcacttcgcattacggtcagtgctacacctatttacctggcagggttctggtttggacctttcgtgggagggatctgcgggggattgtcagatcttctcggatgcctggtttcagggtacgcgccgaatccattgattttggtatcttctgtacttacaggagtactcccgggattgttaaaaggatttgtgaccaggaaaccggatattttccggttcttcggcgttgttgcacttcacgggattgtggggtccctgggatttgcaacatttgggctcagactgtatacaggtatgccatgggcagttctgtattctacaagagctgtacagacattgcttttgacagcagtgaacagtatgctggtttttgctctttacagaagcccgctgactggtatagtaaccaagtctatgtcccaaataagggggaaggcaccggagacagtgaaacggtaattttgcaattggttgaaaataacttggtgatagccggttattttagaaagggaggattttacaatgggattcaaatcagacatcgaaattgcacaggaaacgaccatgcagccggttatggaggttgcaaaaacagcaggtattgatccaaaatatttggaacaatacggaaactacaaagctaagattgactacaacatgcttcgtgacaccgataagaaggatggaaagttaattctggtaacagcaatttctccaacgccggccggtgaaggcaagacaacgactaccgtaggtctggcagacggtatgcgcaagattggcaaaaacgttatggttgcgctccgtgagccttctctgggacctgtattcggcgtaaagggaggagctgccggcggcggatatgcccaggtagtgccaatggaagacatcaacctgcattttacaggcgacatgcatgccattggcgcagccaacaatcttctggccgctatgctggataaccatattttccagggaaatgaactgggaattgacccgagaagagtaacctggagacgctgtgtagatatgaatgaccgtcagcttcgcttcgtgacagacggcctgggcggaagaaccaacggcatgccccgtgaagacggctacgacatcaccgttgcttccgagattatggcagtattgtgcctgtcctcaggaatcaatgacctgaaggcacgtctggcgagaatcgttgtgggatatacctttgaccagaagccggtaacggcgggagatttaaaggcagaaggagctatgtgcgcactgctgaaggatgccttaaagccgaatctggtacagacgctggagcatacaccagccatagtacacggcggaccgtttgccaacattgctcacggctgtaactctgtaatggcaaccaagatggccctgaaattaggggactacgtagtaacggaagccggcttcggtgcggaccttggagcagagaagttcctggatattaagtgccgtatggcagggctgaaaccggacgcagtggttgtggtagcaactgtgagagcgctgaagcatcacggaggagtggcaaaggcagacctgaacaatgagaatctggatgcactggagaaaggacttccgaatcttctgcagcacgtaggaaatatcagaaatgtatataaactgccgtgtgtggttgcgataaacgcattccccacagataccaaggccgaactggatctggtagaggcaaaatgtaaagaattaggcgtaaacgtagcgctgtccgaagtatgggcaaagggcggcgaaggaggaatggcgctggcagaagaggtagtgaagctggtggaagaacccaacgactttaccttctcctacacggacgacatgaccatcgaagagaaattaaatgcaatcgtaaccaagatatatcacggagacggcgtagtactaactccgaatgcgaagaaacaggcgaaacagctgacggagctgggattcggcaaatgcccgatctgtgtggcaaagacccagtacagcttctcagacaatgagaaattgctgggagcgcccaagggattcgaagtaaccatccgtaacctgaagatttctgcaggcgcaggattcatcgtagcattatccggggacatcatgaccatgccaggacttccgaaggtaccggcggcagagaagattgatgtagatgagacaggtaagatttccggattattctaactgtagtaataacacgaaaactgtgaactctacacatagttgcgtgtttcagcggggcggaggaactttttctccgtcctaaaaaaatattacataccattaaggaggacaacatgggattttcaacagtaccttgtaatgaatttgtagaagtattagcatcaaaggcacctgtgccgggcggcggcggtgcttctgctctggtgggcgccatcggaactgcccttggaaatatggtgggaagcttgactgtaggcaaaaagaaatatgcggatgtggaagaagagatgtatgagctgaaggcaaaatgcgataagctgcaggcagacttgcttaccctggtagaaaaagatgcggaggttttcgagcccctgtcgaaggcctatggtatgccgagagagacagaagaagaaaaggctgagaaggccagagtgatggagattgttttaaaagatgcatgctccgtaccgatggaaattatggaaaagtgctgtgaggcaattgacattattgcagagtttgcagcaaagggttctgccctggcaatcagtgatgccggtgtaggcgcagccttctgcaaagctgctctggaaggtgccagcttaaatgtatacatcaacacaaagtctatgaaaaatagagagtatgcagaagagttgaataaaaaggcagatcatatgctggatgtttatccgaaaaaagcggatgaaatttttgcgagcgtacttggcagactgaaataggaaaggggaagaaacatggcaaagcaattactgggaaaagaagtaaccgcagcattaaatgagaggatcaaggctgatgtggcaggattagcagaaaaaggaattcagcctaaattggggatcatccgtgtaggtgaaagacctgacgacgtctcctatgagagaggagctacgaagcgctgcgaaacactcggtgtcgagtatgaaaaattccttcttcccgctgatgtaactcaggaagagttaatggcaacacttgacaaagtaaataatgatgataagattcacggtattcttatcttccgtcctctgccgaagcatctggacgaagcggctgttattaaagcacttaagccagaaaaggatgtggatggtattaccgacggatctatggtaggggtattcgcaggaacaaagcagggcttccctccctgtactcctcaggcttgtatggaaatcttagatcactatggaatcgactgcaaaggcaaaaaggcagtggttgtgggcagaagccttgttgtgggaaaaccggctgctatgatgcttcttcagaggcacgccacagtaaccatctgccataccagaacggtagatatgccgtctgtggttaaggaagcagagctggtaatcgtagccgccggacgggccggagttgtagacgacagatatctgtctccgggacagattgtagtggatgtgggaatcaatgtaaatgaagaagggaagctttgcggagatgttgactacgcgaaggcagaacctgttgttgaagctatcactcccgttccgggaggagtgggaagtgtcaccacttctgtcttagtgggccatgtggtagaagctgcgaagagaactcaggagtaagcagaatagagaagcaaaaaagaatctggcctgccaggttcttttttgctttatagaattcccctagggcagaaactctgtcatgtgtttgcggtaccagagaggcatcatggttctctggcactgataattttttcgttcctgtatccctatagtacggaaaaaagatttccacagggcaacatagggatctgtggtctctctgtgggcattcagttgttccagatcttccagaccaagcggggtgaggtagtattccccgtctgccgggtgtacggcagccagattcctggtgtcatcaataatcatccagttttcagagggcatgcgatcggaaaactggggccccaggatcgtgagtatattgcatttgggtgagatgcgggccatcaatacttcctgatccatgcgctcaaagcggagaaattcccgaaataagtgggcctcattggtgacttttctgctcagttcaaaaaccgtcatcacctgaggcgcctgcagcatttgaagaaccggcggaccggcggcaaatccgagaatcagaaaacgatatatagcgtccagtttattggcttcaaaggacatggctgatttgtagaccagctgataagcctcccagtttagctttttccgtattgtgcgtatgaccttctgaactttttcgggatccgggtttacgtgtctgtattcacagaacagttccatatctccggcaggctctgtcataaggcgcacactgctgtgtccgatggcattggcctctgcccatgcatcatagatgcaggtcatcatatcttcgaatatatccttgcaggtaaatataatcatagagcagctccttacaataaattctataattgaccgctgagacttttcgccgcatcctcaacagtcggggaaaccgtaagattcatatcgtcaaaaagagatagctgacggtaagtttgaggatgctcgatctcccagtttgtccgggcgtcctctccggtaagctgccgggtaaggaagtcttcctgtatgggaatgcggtacatcatccgccctttgcaggtgataaaatattttgcccgctttaacacaattcccattcgtttcaaatgctcaaaatccagcagtccctggcgtctggactggacaatccgggaagctgatttcatccctatccctggtatcttaagcagattttcgtaggaggcccggttgatctccatggggaaaagctcgagatggcgaagggcccagtcacacttggggtccagaagaatattaaagttgggtttttcaatgctcagcagatcttcggcgtggaaaccatagtagcggagaagccagtctgcctgataaagcctgtgttccctgagaagaggcggtgcagtacttagagacggcagacaggaatcttcgttgaggggcacataggcggagaaaaatactcttttcaggtcatactgctgatacagatgctgggtagtagtaagaagctggaagtcattctccggggttgcgccgatgatcatctgtgtactctgtcctgcaggtacaaagggagctggtttgtctccggtatggtgaaccggccgcacgcccgcgggcagggataccgagggagggacggctgtttcaagtcttggggaaggtccggactgaaagatagtattgctcagataccggttggagaagcttcgttccatgcggggatcttttcctatctgcaggcggtagccggtgatgccggattgtatctgctccattggctttagaattccggaaaaggatttgttgggggccagtgccttcaggctctcccgggtaggaagctccatattgacactcatgcggtctgccaggtatccggtttggagaagcagttccggggaggcgccggggatggcttttacatgcacataaccgttaaagtgataactggtgcggagaagcagaagtgtgcggtacatcagctccatggtataggttgggttcttgcatacacccgaactcagaaataagccctcaatatagttccttttataaaattctatggttaaggtacagagttcctccggcgtaaaggtcgcacgcactttgtcattagacgcccggttggggcagtatttgcagtcatatatacactcattgctttgaagaacctttagaagggaaatgcatcttccgtccgacgcaaagctatgacagattcctgccgcgcaggagttcccaagacttcccttctgtccccggcggtcaactccgctggaggtgcaggccacatcatacttggcggcatctgccaaaacagttaatttatcctgaagtgtaagttgatttgctgtattcataatggctctcctgtaagataatagatacaaacgtatgttcttataaaattataccataatatacacaaagaagcaatataaattcgaacaaatgtttgcgatgaaaaaattgcatgtaataaagaacaagctgaaaggttgattttgcatacttcctatactatagtataagcgaatgatatcgtatacccggggcacctatgtcccctggcgaaaacacggctgcatcagaggaggactattatgagaggactggaaacacctgtaacaaagctgagaagaaaagtatttactgagattgccaggctgggatttgaatccagcgcggagtcattgaacgatgacattgaggctattccttataaaattgtgacagagaaaccccagtaccgggaaagtatttaccgggaaagggcggttgtcagtgagagaatccggctggctatggggatggcgctgcgcccggagaaccgatgggtacatctgacccaggggattgaagagagcaatatagatgagaaatattatgaaccgccgttaatgcaggtgataccatctgcctgtgatgcctgcgagccgaaaaaatatgaggtaagcaatatgtgcagaggctgtattgcccatccctgtatggaggtgtgccccaaagatgccataagcagagtaaatcaaaaagcgtatatcgatcaggaaaagtgtattaaatgcgggaaatgcaaagcgaaatgcccctatgatgccatatccaggaaggagcgtccctgcgcacgtgcctgtggggtgaatgccatcggaagcgacgaacaggggagagccagcatccagacagacaaatgtgtctcctgcggtatgtgcatggtcagctgcccctttggggctatctcagacaaatctcagatttatcagctggccaaggccttaagagagaatgaggagatcattgcggagcttgcccctgcgtttatcggacagtttggtccggatgttaccccgggtatgctgaaacaggccttaaaggatctgggattccaggaagtatacgaggtggctgcaggggctgacataggggcagccagtgaagcccaccactatgcggaaaaggtatcaacaggagagcttcccttcctgctgacttcctgctgtccgtcctggtccgttctggcaaagaaatattttcctgatatgatagacaaaatttcccaggagctgactcctatggtagctactgcaagaagcataaaaaaggaacatcccaatgccagagttgtatttatcggaccctgcgcatcgaaaaagctggaagcctccagaaaagcggtgagaagtgatgtggattttgtgatcacctttgaggaactggccggtatgtttttggccagggatattcaggtggaggactatccgcaggacgcctcctcttttgaagacggcgatgcaacgggcgccggacggggatatgcagtggccggtggcgtggcacaggcgattgaaaagtgtctggaagcttattatccggatattcaggtgaatattaagcatgcggagggactggctgagtgcagaaagattctgaacctggccaaagcgggaaagcttgacggttgtctgatagaggggatgggatgccccggcggctgtgtggcaggtgcaggtaccaatatccaggtggaaaaggcggccaggcaggtagaagagtttgtgaaggcttctcccagggagataccggaaaaggatttgtttgaaattgaactaaaataaagtcataaaaaaagaggactgtactgtttcaaccgaggcagaacagtcctttttggtgtctgcccacatgccggggggtgcacaaaaatgcgataaaaactttgcacagaccatgactggttcaggttgctgctgcaaaaaacggttccggggataagcgcgtgtgaacagcagccggaggggacaaattgttaataaaatttatcaaaattcgttgtgaaaaagttggcaataaggtataatactttttagggcatgtgcaatttatacataatttttaggggtgcggcagcacatagctcttttattattgggcagaacaccaaatttaaggaggaaaacaaatgctagatcagtcttattacaccaagacagatgagttcatcgaacattatggacgaaaagccagttcgctcattcctattatgcaggacatccagggggaataccggtacctgccaggggaattacttacttacgtggcaaaagagattggagtgaaggaagcaaaggcatacagtgtagcgaccttctatgagaatttttcctttgagccgaaaggcaggtacataatcaaagtatgtgacggaactgcatgccatgtccgcaaatccacacctattttggaagctttgtttaaagaattgggtttaagccagaagaagcacaccacagatgatatgctttttactgttgaaacagtatcctgtctgggtgcctgcggactggctcctaccttgactgtgaatgatgaagtgcatcctaatatgactcctgaaaaagcattggctttagtggaagaactgagaggtgaaggcttatgattatcaatagcagaaaagaattggaaaagcagagaaaagctgcatctgaagagatcaaatcctacaactgcagaattttagtatgtgccggaaccggatgtattgccactggttctcagaagatttacgatgagatgaaaaagctctgcgcagatctggagggtgtaactgttgagatggaaaaggatgttcctcacattggtgttgtaaagaccggatgtcagggcatttgtgagttaggtcccctgctcaggattgaaccttatcactatcagtatgtgaaggtacagcttgaggactgccgggagatctttgaacgcaccgtactaaagggagaaccggttgaacgtttgttctatcacaagggtgaaaaggcttttgcaaaacccaaggagatcccctttattgcaaaacagacaagagttgtattggagaactgcggaaatatagacgcagaatctatagatgaatacattgcctccggcggtttcaaagcgctggcgaaggctatttttgatatgaaaccggatgaagtggtggaggttgtggaccagtcaggtctccgcggacggggcggcggcggatttcctgcgggcagaaagtggaagcaggtagccaggcagccggaaaaagtacgctacgtagtctgcaacggcgacgagggagaccccggagcatttatggacggaagtgtaatggaaggcgatcccttcaagatgattgagggtatgatcattgcagcgtatgcagtaagtgcccaggaaggttacatatatgtacgtgcggagtatcctctttccgtagcccgtctgaagatggccatcgctcaggcggaagagtatcatctgcttggggataaaattatgggaagtgatttctctttccatcttcatattaaccggggcgccggggcttttgtatgcggcgagggaagtgcgctgacggcgtctattgaaggaaacaggggaatgccccgtgtgaagcctccgagaaccgtggagaagggactgtgggaaaagcctaccgtactgaataatgtggagacatttgccaatgttccgaacattatactcaaaggggttgagtggttccgcagcattggctccgaaggcagcccgggaaccaagacattctctattacaggagctattgagaataccggactgctggaagttcctatgggaactactctccgggagattatctacgatatcggcggcggaatcaaaggcggcggagagttcaaggctgtacagatcggcggaccttccggcggatgtctgatcaccccgcacctggatgttggcctggactttgactctgtaaagaaatatgatgcaattgtaggatccggcggtcttgttgttatggatgagcatacctgtatggtagaggtcgccaggttctttatgagctttactcagagagaatcctgcggtaagtgtgttccctgccgtgagggaaccaagcgaatgctggagattctggaacggattgtaaagggagaaggaaaactggaagatctggatcagctggaggagctggctgagatggtgcggagcatggctctctgcggtctgggcaagagcgcgcctctgccggtattaagtaccctgcggaccttccgtgacgaatacgtggagcatattgtggaaaagaaatgtgtatccaaaacctgtgaggctctccgctcttttaaaatcaatcctgaattctgcaagggatgcagcaaatgtgcgaagaactgtccggttggggcaattacaggtaagttaaaggaagcgtataccatcaacaacgatctctgtattaagtgtggtgcctgcaaggataactgtgcatttgatgcagtatatattgaagcataggaggatttgacatgggatatatgatgattgacggtagaaaagtggaatttaccgatgaaaggaatgttctttctgtaatcaggaaagcgggtatctccctgccaaccctgtgctaccattcagaagtatctacttttggtgcctgtcgcttatgcacagtagaggatgaccggggcagaacctttgcatcctgttccgaagagccaagggatggaatggtaatctatacgaatacaggaaagatcaaaaaatatagaaagttaattgtggaactcctgctggcagcacactgcagagactgtacgacctgtgtgaagagcggggagtgtgtactccaggaactggctcacagaatgggcgttaccaacgtccggtttgagaataccagggagattcgtcctctggataccagttctccatctatcgtaagagaccccaacaaatgtattctctgcggagactgtgtgagagcttgtgaggagattcagggaatcggcgcactcggatttgccttccggggcacggaggctatggttatgccggcctttgacaaaccactggcggaaacggactgtgtaaactgcggacagtgccgcgtatattgtcctaccggtgccatctccattaaaacgcatatggatgaggtgtgggacgccctggcggataaggatacaagggtagttgcccagattgctccggcggtcagagtggcagtgggagattccttcggtcttacaaaaggcagaagcgtgatgggcaaaattgtgaatgttctccacagaatgggatttgatgaggtatacgacactgccttcagtgccgaccttactgtgatggaggaatcagaagaattcctggagagactggagcagaatgagaatctgccgcttcttacctcctgctgcccggcgtgggtaaagtttgtgcatgaccagtatccggaatttgttgaaaatatatcaagctgccgctccccccagggaatgttttcagctgtaatcaaagaatattaccggagtcctaaaaattccggcggaaagaaaacaattgtagtctctgttatgccgtgtactgcgaaaaagatggaggcaatccgtcccaacagctttacaagaggcaaacaggatactgatatagtgatcactaccacagaattaatccgtatgatccgcaattccggcattgaatttgagacgctggatcccgaagcctgtgatatgccgtttggcttcagctcaggcggaggcatgatattcggtgtgaccggcggtgttacagaggcggttctgcgccgaatgacagagggacacagcaaagtagagctggatgccatctctgaatgcggggtaagaggcagtgagggaatcaaagaggttacattgccctacaatgatacacagcttaatatctgcatcgtcagcgggctggccaatgccaggaccgtaatggagcgggttagaaatggggaggccaactaccatttgatagaagtaatggcctgccgcaggggctgtatcatgggaggcggacagccgccaagagccggcgaccgcacaaaagcggccagagaaaaagggctgtataatgcggacaatgtaacaattataaagaaatcagacgagaatcctttgattgctcctctgtatgatggattattaaaaggcaaagtacatcagttattacataaccaggaatcatagacaccagtgtagacgtataaagatggggctcgcctgcttcggctggccctgtttttacaaaatatatgtcaaaaaattaacattccggaaacagcaggctggtgaaatgggaagtcactgagcaactgttttaataaagggaactagtttcccaaagcgttaaaaaaagcagaaagagattggaaaggaggtactcatgagtagactgagtataattacacaaaacaaagctcagacaacagtagaagaactctacaaagatctggagcgaagaattgtagccagtcctccgggactttgtcctgtcgatttagcggtatcttttctaaaggtctgtcacgcgcaaacctgtggaaaatgtgttccctgccgtgtaggattaggacagttgcaatgtttaatggaggatgtattggagggaaatgctaccctggaaaccattgatttaatcgaaaagacggccagaggcatttattactccgctgactgtgccatcggatacgaggcagccaatatggtgctgaaaagtattaatggattcagagaagattttgaagagcacgtattaaggggcaggtgtacctgcgagctgaatcagccggtaccctgtgtagcactgtgtcccgcaggcgttgatattcccggttatgttgctctggttgcagaaggaaggtatgcagatgcagtttccctgatccgcaaagacaatcctatgccctctgtatgtgccctgatctgtgaacacccctgtgaggcaagatgccgccgcaacatgattgacgacgccatcaatatccggggactcaagagatatgcggtagatcatgcaggagatgttccgcttcccgcacctgcgcctaagacgggcaaaagagttgccgtgatcggcggcgggcctggcggcatcagtgctgcctattacctggcgctgatggggcatgaggttacaatctttgaacagagaaagcagctgggaggcatgctccggtatggaattcccaattaccggctgcccagaactgtactggataaggagattgagaccctgctgtctatcggggtgaaggtagagacagaggtaaccattggtgagaaccccaatattgttgatatccgcaaccagttccatgccgtttacatagcgatcggtgcccatattgataaaaagattgggattgagggagaagacgcggacggggtaatctccgcggtagagcttctgagaagcattggagacaatgaggttccagactttactggaaaggatattgttgtaatcggcggaggcaatgtggcaatggatgtggcccgctcagcggtgcgtctgggggctgacagggtccgtattgtatacaggagaaggattcctgatatgacggctatgcccgaggaagtacagggtgccattgcggagggctgtgaagtgatggaacttatggcgcctacgcatattgagaaggatgaggaaggaaaggtggccgcactctgggcacagcctcagattatcggtgaggtgaggggcggacgtcccactccaaaagcggcagatgctccgaaagtgcgtctggaatgtgataccgttatggtggccataggccagggtattgaatctaaatcctttgaggcttacggaatccccgtgaagcggggcgtaattgaggccctcagctggagcggtatcaaggatatccccggtgtctttgccggcggagactgtgtaaccgggccggcaacggtgatccgggcaatcgcagcgggcaaggtggctgccgccaacattgacgagtatctgggctacaaccataagattaccaccgatgtggagattccgaagatccgcctggatgacagacccgcctgcggccgggtaaatatgaaggaaagagatgccgctgaacggaaggatgattttgaactcattgagtgcggtatgacccatgaggaggcctgtcaggaatccaagcggtgtctgcgctgtgatcactttggattcggcgtatttaaaggagggaggattgacaaatggtaaaactgacgatagaccatcaggtagtagaagtgccggaaggcactaccattcttgacgcagcagcggctgccggcattcctgtccccaccctttgttatctgaaggaaatcaatgaaattggtgcctgccgtgtctgtgtggtagaaatagaaggaaaagaaaagctggttacttcctgcaataatgttgtggaagaggggatggcagtatatacaaacagccctaaggtaagggagacaagaaagacaaatgtgaagttgattctgtcccagcatgaaggaaactgtcccacctgtgtgagaagcggaaactgcaaccttcagaaaatatccaatgacctgggaattctggatgttccctatgaaacacagcttccccacagcaaatctacaaaagattttccgctgtaccgcaattataagaaatgtattaagtgtatgcgatgcattcagatctgcgataaggtgcagagccttggcatctgggacctggcaaatacaggttcgcgcacaaccgtagatgtttccggaaaccgcaagctggaagcttctgactgtgcactctgcggtcagtgtatcactcactgcccggtaggcgctcttagagaacgggatgatacagatgttgtatttgatgcgctggctgatccggataaaataacagtagtacagattgcacctgcagtccgtgccgcctggggagaaagtctggggctggaacgggaattcgccacggtgaaacgcctggtttccgctctgagaaggatgggatttgactatatatttgacacgaacttttcggctgaccttacgataatggaagaaggcagtgaattcctgaaacgtctggaaaataaagagaaagaaaaattcccaatgtttacttcctgttgtcccggatgggtgcgctttgcaaaatcccagtttccggatatggtagatcagctgtcctccgcaaagtcacctcagcaaatgttcggcgcaatggccaagagctattatgcagatcttttgggcgttgatccggaaaagatcttctccgtatctatcatgccctgcctggccaagaagcatgaatgtgctctgcctaatatgaatgatgcgggagcaggccaggatgtcgacgttgtattaaccacaagagaggtagaccgtcttatccgtgcggaacatatcgttgcggcaaacctggaggaggaagagtttgacatgcctctgggcgtgggctcaggtgcgggtgtaatcttcggggctaccggaggcgttatggaggctgctcttaggagcgcttattaccttgtgacaaagacgaatcccgatcccgatgcctttaaagaggtgagaggaatggacggctggaaggaagccacctttgacctggccggaactccgcttaaggttgctgtggccagcggtctgggcaataccagaaagctgctccgtgctctgcagaaaggcaaagtacagtatgattttgtggaaatcatggcatgtcccggcggctgctccggcggaggcggccagccaattaaagatggagaagaattggccggcgtccgtgccgataatctctacggcctggataaggtgagtgatcttagattttcacacgaaaatccatcggttcagaagtgctacgaatgttatctgcagagacctttgtcacaccgttcccatgaactgctgcacacagaccaccacgcctggaagatgcctggagagaagtaaactcagcccggcgggcaatttggtttaaaatagtgtcatagaaagagtacccccttgcatatactgtatcagtataacaagggggtattttgaatggatacatataatgtgtataaagatatacaagcccgcacaaaaggggagatctacatcggcgtagtaggcccggtgcgtaccgggaaatctactttcatccgccgctttatggaactggttgccctgccgaatatgccggaggatcagcaggcagaggtaagagatcagctgcccttgagcggttcaggaaagctgatcaccaccgtagagccgaaattcattcccaaagaggcaacagaagtcacactgagtgatgatgtgaaagcaaagatacgactgatagactgtgtgggctatatggttccggaagcaaccggaaatatggaagaggaaaaagaacgcatggtcaaaacaccctggttcagctatgagattcccttccaccaggcggcagaggtagggacccaaaaggtgattcaggaacattccagcataggtcttgtggttacctgtgacggttccttcggtgaaatccccagaaacaattacatagacagtgaagaaaagacaatccaggagttaaaaaaacaggggaaaccatttctggtgctggtaaactctcaaaagccatataaagaagagaccgtgcagctggtacagtctctgcagaaaaaatacaatgcctcggtgattagtgtcaactgcgaacaattaagaaaagatgatattgtaaggattctggaaaaggtactctatgaatttccggtggtacagctggaattctacatacctaaatgggtggagatgctgcctcccagccactatctgaagtctgacctgattgctaatattaaggaattgctgggaaaggtgaagtatgtcagagatatctcgaaggataatctccagatggcttcttcctacattaataaagctgttattgatcaggtagatcttgccacaggcaaggtaaaggtacatctggaaatggatgaaaaatactattacgagatattgagcgaaatgactggggtaaacatttctgacgaataccagctgattcacaccatgaaagagctttccaaaatgcacgaagagtacattaaagttcaggatgccatctcttctgtgagggggaaagggtacggcgtggtgactccggatcgcagtgaaattgtactggaagaacccgttgtcattaagcagggcaataaatacggagttaaaataaaatcttcgagtccgtccattcatatgataaaagcaaacattgaaacggagattgctcctattgtgggaagcgaggaacaggcaaaagatctgattgcttatatcaaagccggggaacagcgccaggaaagcatctggcagacaaatatctttggaaaatccattgagcagctggtagaagacggaatccacacaaagctcgtacagatcagcgacgaaagtcaggtaaaactccaggatactatgcagaaaattgtaaatgacagcaaaggcggcatggtttgcattattatctgaccaggcagtaacaagtcctggcttacagagctgaatcattgattttagaaaaatgggtggctgtatgcaatacataaattatgtattgcatacagccatcattttttgcgttttcggggcactggcctccagttccttccgattgacttttaccaaataaaattatataatggataggtctaagcagcacgatcggacaatgtatgacataagaaaaagaggtacagcatgaaacgagacttgaaagtacaggccttactatatctgctgaccttcagtatgtgcgcacctgtcactgcccggggggagcagctggaaaaagggcaaattgcggacattctggagaacgcagaacaggcagaagcagaaaagaacccgtccggggaagagattcctttggaagaaaagcctatggaagaagcgcagaaagagactgcagacacgcgggcagccagtggatgggtaagtcaggaaacttccgcacagggtacaaagtggtggtaccggtatccggatggcacatatccggcagacggactctatgaaatcggaacaaagacctattattttgatgcagacggctggatgaaaaccggctgggttctcctggaggacaagtggtattactttttgccagacggagcgatggcggtcagccggtgggttggaaattattatctgctggaagatggaaccatggccgtgaaccaatgggttggaagctggtatgtaggagataacggggcctggattcgcgattacggtaagggaaagtggatcctaaaggccggcaaatggtggttcagggaatatgacggcagctatcccaaatccgtttttaaggaaatagacggaaatatctattattttgatacagacggctggatgatgaccggatgggtgtacatagaacagaaatggtattattttaattcctcaggtgccatgctcacagggtggcagaagctggggaatgtatggtattacctggaaccggatgggaccatggccacaggctggaaaaagctgggaagtcaatggtattatctaaacagcagcggttccatggccacgggatggaaaaatctgggaaaccggtggtattattttcattcctccggagtcatggctgtcggctggacccttgtggggaaacagtggttctatctgaatgaggacggtgtgatgcagaccggaaagctggtacaggggaaccatacatatattctgagcggcagcggcgccctggttaccgggtggtatctggaaaacggtgcttggtactactatgacaacaatggatttctggtcaaaggctggcagaaggtggggaatacctggtactatctcagggaagacggcaccatggccactgactggctgcagcttgggaacacctggtattatctggacggcagcggagctatggcgaccggctggacctatgtacggggcagatggtactatatgaacagctccggggccatggttacgggctggcagaagcttgggaacacctggtattatctaaattccaacggggctatggcgaccgggtggaattatataggaaataaatggtactatttgaacggaaacggggctatggccaccggctgggcttatgtgcagggcaaatggtactatatgaacagctccggggccatggttacaggctggcaaaagcttggaaaaacctggtattatatgaatgggagcggagccatggtctccggctggaataagattggcggtcattggtatttctttaacggaaacggggccatgcttacgggctggcagaagataggcggaatctggtactacatggatggaagcggagctatggccgccggacggtgggtaggcaattactatctgagggaaaacggagccatggcggtaaactgtattctcacgattggaggggtcaaatacagctttgacgctgccggaatcggcagtaaagtagtggaatccggcggatatattgagattagagattctaacggaaagatttataaggtagaggccagctatgccacagatccccaggtctccgacgaggatttcctcacagcgattgcatatgcggaagctggcgaccagggaatctccggaatgtcggcggttgttatggtgattttaaaccgtatgaacagcagtgcttttcctaatgacctgcggacggttgtctatcagagaaagcagttcgaacctgccagaacaggggttcttacaaaatatctgaagaatctgaattctattcctaatccttatctttcaaatacaagaacagccgtgcgaaacgcaatgtcgacgtacaagctgtataaagaagggaaaggcaagcgcctgattaacggggtaacacttccctcaggaaaaaaagaatttgactatttatattttatgaccccaaaggcatttgaaaatctggggcttgatgagaaaaaatgtgatgtattgtatttatctccatcttcagataaatacaaagggcatattttctttaacaaatgggtagaaaaataagaaaactgaatgcaggatagcagaggaagcaggtgaaagtcctgcgcaagtccgttactgtgaaagccagatactaggctatcctgacacacaaaaaatgtctgcggcaaccgggcttttgtgggacaggtaggagttcgttgccattttgcggcggactcttttttcttttccaggatggaccgctgcgttcaaaaggagttgtgtatggaacataaaaatggtttggaagatttctatatcgtgaagaataacaagaaaatgcggtatgggtatacgacagggtcctgtgcggcggcagcggcaaaaggggctgccaggatgctattgtcccaggctcaggtggaggaagcagacctgatgacgcccaaggggattcttcttcatctgcttcttttggaaatcagctggaacaaagataaggcagaatgctgcgtacagaagtatgcaggggacgatcccgatgccacagacgggatacatatttatgcaactgtggaaaaacgcagagaacccggggttgtcattgacgggggagtcggtgtggggcgagttaccaggaaagggctggaacagcccgtgggagctgctgccattaaccgggtgcccaggcgtatgattgcccgagaagtggaacaggtgatagaggaagaaggctacgagggcggcctgaaggtgacgatctggacaccggaaggagagaagatcgggaaacggacgtttaacccaaggcttggaatccagggagggatctccatcttaggcacctctggaattgtggaacctatgagtgaggcggcgctgattaaaagtatagagattgagatgcgtatgcgggttgaaaacgggggaagatatcttctggtgactcccggcaattacggtgccgcctacttgaaggaacacatagaactggatttctcccaaaacataaagtgcagcaattatgttggggaaaccattgatatggctgttggcatggaagcaaaagggattctttttatttctcatatcggcaaatttattaaggtggcagccggcataatgaatacacattcccggtctgcggacggaagggccgagattatggcggcaaatgcggtacgggcgggcgcttcccttgagacagcaaaagagcttttgcagacaggaactacggacgaagcccttgagattctgcagagggagggccttgtggagaagaccatggaggaggttctggagagagtggaatactacttaaatcacagagcttacggacagctggagacaggggcaattctattttctaacgcatacgggtatctgggcaggacctcccgtgtgccggatttgctggataaactgagagaacaacaaaatattacatagacaaaggagatattatgatgcaaggaaagctttatggaattggggtgggaccgggagacccggagcttttgaccttaaaagcgctgcggctggtgaaagagtgtgatgtaatagcagtaccaggtacagcggcggaggaaagtgtggcctaccagattgtgaagggagcctggcctgagattgctcaaaaagaactgcttcccgtacctatgcccatgacaaaggatcccaggcagctggaggaaaatcatgaaaacggtgccagaagcattgaatcgattctgcagaaaggaaagcaggttgcctttctgaccctgggagaccctactgtgtattccacctatctctatgtgcacaagaaaattcagagctggggctatgaagtagagatcgtcagcggaatcacctccttttgcgccgttgctgccagaatgaatatggggctggtggaaaaggcagaacccctccatgtgatacctgcctcttatcagattgaagaggcactgaagctgccgggcacaaaggtccttatgaaggccgggaaaaagctgggagaggtcaaagaacagcttctgtccatgggggcacagggagtgatgattgaaaactgcgggatggaaaatgaaaaaatataccataccattgaagagattcctgagaatgcaggatattattccctgactattattaaagaataaacacacaaaggagaagatatgatacattttgttggagcgggctctggtgccccggatttgattacggtaagaggaaagaaatatttagaggaagcagatgtaattatctatgcaggttcgctggtaaatccacagctgctggagtacgccaaggaaggatgcagggtatacaacagtgccaggatgacactggaagaagttctggatgtgatgcgcagcggggagaaagaaggaaaaaccactgtgcgcctccacacgggagatccctgtctctatggcgccatcagggagcagatggatgtgctggatgaggaaaacatcgcatatgactcctgtccgggtgtgagttccttctgcggggctgcttctgctctgaatctggagtataccctgccggatgtgtctcagagcgtaatcataacccgtatggcgggaaggacgcctgtccccccaaaggagagcattgagtcatttgctgcccaccaggcaactatggtagtatttctaagcaccgggatgttaaaagaactgagtgcccgtctgattgagggcgggtataccgaggatacgcctgcggctattgtgtacaaggccacctgggaagatgaaaaggcctttgtatgtactgtggggactctggataagacagcaaaagaaaatcatataacgaaaacggccttaatgattatcggcgatgcggtagcccataatcactatgagcgttctaaattatatgatccgggattcaccacagaattccgtcagggtacagataccaaataagcggaggaaaatatgaagatagcagttatcagcttcagccggtccggctatgctctgggagaagctctccacgcagggcttatacaggaggggcatgaagtaaccacctacacgaaaagcaagtatacaaagatggttttagatgaatcccagctggatattgacgcgaagacaatacgcaatgtaaagcagtttgccaaaccagtggatgaatccatcggtgcatggaccagtctgcggtttcagaattctgatgctctgatctttatcggggcctgcgggatagcagtgagggccattgccccttatgtaaaggataagaaaaaggatcccgctgtggttgtggtggacgaacagggaaattatgtcatctctcttctgtcaggacatatcggcggcgccaacgccctgactctggatgtgagcagaatcacaggcgcagaacctgtaatcacgacagcaactgatatcaatgaaaagtttgcggtggatgtatttgcaaagaagaatggtttttatatttctgacatggggctggccaaggatgtatctgcagcgctggtggcaggaaaggaagttggattttacagtgattttccctggcttggtgaactgccggaaggccttaagatagctcatgaagatgaggagcggcccgagcttgggattgcgattaccagcagttacctggagcatccgttcgtacataccctgtacctggttcccagggtcatcacactgggaatcggctgcagaaaagacactgcaaaagaggagatacaaaatgcagtgagaaaggcctgtgatgagcagctgattccaacagttgccatggagcaggtggtcagcattgacctgaaaaaaaacgaacctgggctcatagagtactgcagggagagaaatcttccctttatcacgtacacaaaagaggaattggctcaggtagaaggaaaatttacaaaatctgaattcgttgaatccattacaggactggacaatgtctgcgagagaagtgcggtgaagggcagtgaagacggaagactgattttaagaaaacatgcagaaaatggggtaacggttgcgttagccatgaagaaatggagtgtggaatttgaataaattatatgtagttggcattgggcccggcgagtatgaacagatgaccataaaggcagccaatgccctgaaggaaagcgatgtaatcataggatataccgtatatgtggatctggttaaagaacattttcccggaaaagagtttatgacaacaccaatgaaaaaagaagtagaccgctgtgtgatggccttcgaggaagcaaaaaaaggaaaaacagtctccatgatctgcagcggcgatgccggggtgtacggtatgtcgggccttatgtatgaagtgggagtcagctatccggaggtagagctttccgtgattcccggtgtgacggcagccaccggaggaggcgctgtgctgggtgcccctctgattcacgacttttgcctgattagcttaagcgatctccttaccccgtgggaaaagatagagggaagactgctgggagcttccaaagctgattttgtgatctgcctgtacaatccttccagcaaaaaacgcagcgattatctggcaaaggcatgtgaccttatgatgcagtataaatcagaggataccgtgtgcggcattgtggggaatatcggaagagacggagaatcttttaaggttatgacattaaaagaactgagggacacgtctgttgatatgtttacaacggttttcatcggcaattcccagacaaaagtgataaacggaaaaatggtaacgcccagaggataccggaatgtgtgacgttcttatatttggtgggacaacagaaggaagaaaaatcgcagaatatatcagccgccaccatatctcggggtatgtgtgcgtggccacagagtatggtgagagtcttctgcctcaaaatgagtatgtcagggtttcccatgagcgtctgaaggaagaggagatgtgcgggcttatagaaaaggaatctccccgagtcgtgatcgatgccacgcacccctatgccgctgaggtgacccgcaatattaagagcgcctgccataaggctggggtgccctgcgtccgcctgctcagagagagtgctggagcagaagacggcacagctgtggaacatgcagtttatgtggattccattgaggcggctgtaacctatctggagcatactaagggagggatcctggtcaccacaggcagcaaggaaatcggtaaattcacccgtctggcggattacagagaaagggtctatgccagggtcctctctcttccaaaagtaactgcggcttgtgcagagatgggatttgagggaaaacatcttatctgcatgcagggaccgttttccagagaactcaatgaagcaatgatacggcagctggactgcaggtatctggtcaccaaagaatccgggagcacgggaggatttttagaaaagtgcgaggcggcaaaagcatgcggctgtgagctggtaatcgtcggcaggccactgcaggaaaagggtctgtcccttctggagtgcaaaagatatcttgcaggtgaattcggtctgtcaggaaagacagaggttgccctggtaggcatcggcatgggggatgagaataccatgacggtgggcggcagggaggcatgcaggagggcagagataatcataggagccgggcgcatggcaaaagcagcggcaaagccaggacaggacgtttattgcgaatacgacgccaggaggattcgggagtatctgacagagcatccggaatatgagcgcgccgcggttgtcctgtcgggggatgtgggattctacagcggctgcagaaggcttctggaagaactgaaagaattccaggtatctctgtactgcggaatctccagtctggtatactttatgtccagaatccggaagccgtgggaggatgtgaagattgcaagcgcccacggcagagcgtataacctcatacagggaatccgaagcaatccccgcttttttgccattctgggcaccggagacggggtatcacgcctggctgaaacattaatggaatatcatatggaagaggttaccatctatctgggagaaatgctgtcctatccggaggaaaagatattaaaaggtaagccgtctgattttctgggatatcaggggaatccgctgagcgtaatatacatagaaaaccccgaagccaatgagattacggtgacacatgggatcagggacgcggcatttgtccgggggaaggttcccatgacaaaagaagaggtgcgcagcatttcactgtccaagctgcggctgacaaaggacgctgtctgttatgatgtaggcgccgggacagggtctgtctccatagaaatggcgcttatggcccgggagggcagggtctatgccgtggagaagaagccggaggcggcagcgcttctggaagagaataaaaaagtgttcggggcggataatctgacggtaatctccggtctggcgccggaggccctggaggagttggaagcacctacacatgcatttatcggaggatcttccggcaatatgaaagtgattctgcagctccttctgaaaaagaatcccggaatccggatggtaattaactgcatcgctctggaaaccgtggcggaggcagtagactgtatgagggagctgccggtgacagatgtagatattgtatctgtatccatcagcaaatccaagactgtgggacgatatcatatgatgatgggagaaaaccccattaccattatctcctgtacaggaaaagaggtggaggaaggatgaaaatccccagatttcttatagcagcaggagcaagcggcagcgggaaaacgcttctgacctgcgggattctgaaggcattaaaaaaccggggactgcaggtggcatcttttaagtgcggccctgattatatcgatcctatgtttcacagcaaggtaatccgggccaaatcccggaatctggatacgttttttacccctcctgagattgtcagacatctcctggaaataaactgtaccgaccaggatattgctgtgatggaaggggttatggggtattatgatggaatcggaggcactacatcacaggccagtgcctatgaacttgccgcagttaccaaaacccccgtagtgtttgttgtaaactgtaagggtatgagcgtatccatacttccttatatccagggatttctcggatttaaagagaacagcggtatccggggagtcattctcaatcagatgtcccccatgctgtatcccagagtgaaggaattgattgagaaggagcttccggtgaaggtgctgggctatgtgccaaatgtaaaggaatgttccattgaaagccgccacctgggactggttttgccggatgaggtggaacagcttcaggaaaagctggggcagctggcagatattctggaaaaaacaattgatctggaagcgcttcttgcgctggcagaaacagcggaggatatctctgcttcacgcccggaaaccttctccccggactatgggtttacgctggacaagtctgtgagaattggtgttgcaagagatgaggccttttgcttcatctatgaggataatctgcgccttttgagaaagatgggcgctgagcttgtggagttttcccccctgcaagacatcagtctcccggaggggattcagggacttcttttatatggaggctatccggaactctatgcagatgctttggaatccaacagagggatgatagagagcattcgccgggagttccgaaaggggcttccagtgatcgcggagtgcggtggatttatgtaccttcatgaaaccatggaggatatggaggggagtgcccacagtatggcgggcatcattccagggaaggcataccatacgccgcaattaaaccgatttgggtatatctacctatcttccggggatggaacagtatttggggaacccatggagcaaatcccggcccatgaatttcattactttgattccactgcctgcgggggagaatttctggcaaggaagccggtgggacgcaggagctggaactgcatgtatggcagagaacatatgctggcaggctttccgcatctgtactattacgggaaacctcagattgcaaaggcttttttgcaggagtgcagccgctatgcaccccaaagccagtcaaacgtctaaaaaagggaaagaaggaaaagaaaatgaatttagaggaaacgctgaaatgtatcggtcctctcaatgaggaagctatgaaagtcagccggaagcgctgggacagtattgcaaaacctttgtacagcctgggtaagctggaatctctgctggtgcagattgccggaattacaggaagccaggaaattgatctttcaaagaaagcccttgtgccaatgtgcgcggacaatggggttgtggcagagggggttacgcagacaggtcaggaggttactgccattgtggcagagaactttttgacctgtgaaacctctgcggctattatgtgcaagagtgccggggccgatattttcccggtagacatcggagttgcggtggataccaatatcataaacagaaaaatcgcctatgggactaaaaacatggctgtggagccggctatgacaagggaagaggccatacgcggtctggagatcggaatcgcaatggtaaaggaactaaaagacaaaggctatacgatcattgctaccggcgagatgggaatcggcaacaccacaacaagcagtgcagtggcggcggttcttctggggcagcccgcggaagcagtcacaggcaaaggagccggccttacaagtgccggactggaaaagaagattgcaacgatcaaaaaggcgattgcacttcataaaccagacagagaagatcccattgatgtgctggcaaaggtggggggctttgatattgccggaattgcaggtatgttcctgggaggggcggcctatcatatccctgtggtcattgacgggtttatatcggcggtaagcgccctcctggcctgtcggctggctcccttggcaaaaggctatatgatctcctctcatgtctccaaagagcctgcggcccatatgattctggaggcgctggaccagtctccctgtctgcactgtgatatgtgcctgggggagggaaccggggcggtagctttattccctgttttagagatggctgctgcggtctatcaggggatgagtacgttcagcgacatagagattgaggaatacaaaccactgagctaaaaggagaagggtatgattacattaattaccggtggaagcgggagcgggaaatcagcatacgcagaagataccctgctgtcctttggcgaaggggagcgaatctatatcgctacgatgtatccctttgatgaagaaagccacaggcggatagagcggcacagaaacatgcgccgggagaaacattttactaccatcgaacggtatattaatttgaaagagctcaccgtgccgaaggattcctatgttcttttagagtgcatgtcgaacctggtggccaatgagatgtaccaggagggaggcgccgggaaagatacggtgcccgctgtcctggaaggtatctttgccctggaccgtcaggcaaaagagctgtgcattgtgacaaatgagatcttttccgacggcatcccctatgaggttgagacagaaaagtatcaaaagtacctgggagagatcaatcaggcaattggaagagtcgccgtaagggtagtggaagtggtatacggtatccctatcgtactgaaggagaattaaatgaaacagatttggaatagttttaaaatagcctttgccatgtactcaaagatccctgtgccgaacagtgactggacgaaagagaacatgagatataccatgtgctttttccccgcagtggggctggtcattggaggacttacctggctttggggcgtctgggggaggaacctggcggaaagccataccttttatacggttatccttctgctgatccccgtggcagtgacaggggggatccatctggacggacttctggatacctccgatgctttatcctcctatcaggaaaaagagagaaagctggagattctgaaagactcccatgcgggtgcttttgccattattataggaattacatattttctgctttacttcggtatttacagtgagctgaccttaaaggggcttcctgttgtatgcctcagttttgttctgtccaggtgcttcagcggactgtccattgcggcatttcctatggcgaaaaacaccggtctggcggcaaccttctcagacggcgctcagaaacagacggttcgaatcactactgtggcatgtggacttcttaccatcctccttatgtgtctgtatcagcctgtactgggtgcctgtgcagctatgggaggaatattgacattcggcttttactatcgtatgtccatgaagcagtttgggggaatcaccggagatctggcgggctttttccttcagatatgtgaattggtgatggcattctgtgtagtggcaggagagattctgctgagaaaaatggcatagcaaaggagatacaggtatgatattaattatcgggggcatgttccagggaaaaaaagagtacgtgcgcagcagatttggcctggaagtgaaagacatggctgacggcagtgtctgttcttacgaagaattgttccgctgccgtggaatctttcattttcacgaatggattcggcggatgctccaggagaatagagatttaacgaatctggcaggaaggctggaaaaagagaaccctcagatccttatcatttctaatgagctggggtacggtgtggtgccggtggactcttttgacagagaatacagggaggccgcagggcggatatgcacccggattgcccggtctgccgtttcggtacaccgggtagtctgcggcattgggacggtgatcaaagatgcttgatttatttcttgtgcggcactccattacctatgggaataccttagggcgctatataggaaaaaggaccgatgaaccccttacggaggacggcattgccctggtgaaacacagatattatccccaggtacaggctgtttttaccagccccttgaagcggtgtgtgcagaccgcggcactctgttatccgggaacccctgttcatacgttggaggagctggctgagtgtgatttcggagcgtttgaaaacaaaaactacaaagagctctcgggaaatgaccaataccaggagtggattgacagcaatggcaccctgccttttcccgggggagagagcagggaagcattcatggagcgatgccaaaaagggttttgccgctgtgtggaatactgcctcagggaaggcctgcgctccggggctttggtggttcacggagggactattatgagcattctggatgcctatgcagttccccatcaggagtattatgactggcaggtgggaaacggcggcggatactgggtgaggacttccgcagaagtatggaatgaaaaagaacaggaactgcatgtggtaaaaagacttgcagaataaatacaggagaggactttattaagatgctgaagtggacaatatttgccctggttttgggcttttttatagatttgatcgtgggagaccctccgtttttataccatccggtcagaatcatcgggaatggaattgcgctgacggaaaaaggcctcaggcgcatattcccaaaaactccgggcggagagcgggcgggcggtttctttcttatcctgattatctgcctgttcagcgcgggagtccccggattgattctatggtttgcttaccattggcatacctggctgggagtatttttggaaacctttatgtgttatcagctgctggctacgaagtctctgaaggaggagagcatgaaggtatacgaacagctgaaggccggaaacctggagggggcaagatatgccgtttctatgattgtggggcgggataccaagagtcttgatgaggagggagtcacaaaggcagctgttgagaccattgcggaaaacacctcggatggaatcattgccccgcttttttatatggctcttgggggcgctcccttgatgtttctgtacaaggccattaacaccatggattccatggtaggatataaaaacgataaatatctcaatttcggacggctgcctgcaaagttagatgatgctgctaattttgtacctgcaagaatatccgcgtggcttatggtggcggccagctttttcctgaagatggacagcagaaacgcaacacggatttacagaagagacaggcggaatcacgcaagtcccaattctgcccagacagaggcagtgatggccggagcgcttggggtgcagctggccggagacgcctattatttcgggaagctttaccagaaaccgacaattggggaccgtatccgtaagattcagtatgaggatatccgttatgccaacaatctgctctatgccagtgcgggaattggcgtactgtttttcggactgattcggctgatgcttcagatcgcgcttcaaatcgtatagaaccgggagaatacatatgaagaaacatatacacggcggggatgtgtaccgtcatcaaaacgtgattgatttttcggcaaactgtaatccactggggactcctgccagcgtaaagcgggcagtcgccgaaagtatggagcaggtgtaccactatcctgatgtgaggtgccagaacctaagagacgcattgtctgtctatgaaggagttccggcggactggatcatctgcggaaatggggctgcggatctgattttttctctggtgctggccctgaaacctaagagggcgctggtgccggcccctacctttgcggaatatgagcaggccctggaaagtgtgggatgtcaggtgcttcatgccccaggcagagaggaagacggatttgccgtggatcaggcgcttttgcaggccatagacgataccatagatattttatttctgtgcaatcctaataatcccactgggattctcacagagcctgagaggctggagcaggtgatggatgcctgccgccgccacggcgtttttcttgtgctggatgaatgttttctggactttgtttgcagtccgggaaagtatacccaaaaggcttccctggaaaaccggaaagatctgttcatcctgaaagcatttacaaagcggtatgcaatggcaggaatacgcctgggctatggactgtgcagcagccaggacctgttggagaagatgaaggaggttactcagccctggaatgtttccactctggctcaggcagccggaatcgctgctttgaaagaaaaagaatatgtggccagggccacagaactgatccatagggagcgcgggtttctcaaggagaaaatgcgtgaggcagggcttcaggtatatgattcccaggccaattatatctttttcaagggacctgaaaaccttcaggagctctgcctgcaggaggggatattaatccgggactgcggcaattactatggactggcaagaggatattacaggattgcagtccgaacccatgaagagaacctgacccttatgagggcttttgaaaaagtactgtaaaacagagaaaagagggatatattatggcaaaagcaattatgattcagggtactatgtccaatgccggaaaaagcctgcttacagcggggctctgccgtattttcacccaggacggatataaagtagccccttttaagtcacagaatatggcgctgaattcctttatcacagaggaaggactggagatgggacgagcacaggtgatgcaggcagaagcggcgggaatcaagccatctgttctgatgaacccaatacttctaaagccaaccaatgatgtgggctcccaggtcatcgtcaatggggaggttctcggcactatgagtgcaagagactattttgcttataaaaagaagctgatacctgaagttatgaaagcctaccatgcattggcagagaagaatgatattattgtcatagaaggcgccggcagtcctgcggaaattaatctgaaggaagaagatatcgttaatatgggcatggcaaagcaggccaaagctcccgtgcttttagtgggagacatcgacagaggcggtgtctttgctcagctgataggaaccattatgcttctggacgaggatgagagaaaaatagtaaaaggcaccattgtaaacaaattcagaggcgacaaaaccatactggatcctgggctgaagatattggaggagaaaacaggcgttccggtggtaggtgtagctccctatctgaatattgaggtagaagatgaggacagccttacggagcggtttgaagcgccccgggaagtcggtgtcattgatattgcggtaatccgccttcccagaatctctaactttactgattttaaccctctggagagtatccccggagtttctctcagatatgtgaagcatccccatgagctgaaacagccggatatgattatactgccgggaaccaagaataccatggaagatcttctttggatgcgccagacaggcctggaggcactgatcctgaaagaggcggcaaaaggaaaaattatctatggcgtctgcggaggatatcagatgctgggagaaaccctttccgatccccatcacgtagaagcagggggagagattaagggcatgggccttctccccatggatacgatttttgaacaggcaaagacaagaaccagggtgacaggcaccttcagacatataggaggtgcactaaagcttctggaaggaaccgaactggaggggtatgagattcatatgggagaaagcgtcctgaaggagggtgcggtatctatgaatgaaatcacggatggggtcagccgtgtgacaaagcccgacggtgcctgcaaagacaatgtctatggctcctatgtgcacgggatcttcgacagggaagaagtggccggaaaaatcatccgggcaatcggagccataaaaggaattgatgtagaggaaatgaccagtattgattttcaggcattcaaggaaacccagtatgacattcttgcggcagagctgaggaaacatctggatatgaagaaaatatatgagattttagaagccggtatataaaaggagaggagaacgtatgaaaatagaactggaaaatgtgctgcccaaggagatagaaagcagaagctttgagataattacagaggaactgggagatacgcctctgatccccggcactgagctgattgtaaagcggtgtatccatacaagtgcagacttcgactatgcccggaatctctgcttttctgatggagcagtggaggcagccatagcggctattaaagagggggccagcattgtcacagatacccagatggcaaaagccggtattaataaaaaagtcttgaataaatatggcggcaaagtccattgcttcatgtctgatgaagacattgccgagattgctaaaaaaagcggttccaccagggcaacggccagtatggataaagccgcgtctatggaagaagagtttatctttgccatcggaaacgcacccactgcgctggtaaggctttacgaattgatgcaggaggaaaaaatccaccccaagctgattattggagttcccgtgggatttgtaaatgtggtgcagtcaaaagaactgatcatggagacagatgtgccttacatcgtggccaaaggacgaaagggaggaagtaatattgctgcctgcatctgcaatgcattgctgtatatgatcgataattccagggagtagatatgggaaggggacggtgagggagagtccgtgcgggaggatggttcttgggagtaggacgcctgtgttccggggacacctccgtcgcgaggagagtctaagccaaaaccggaatcccctccggagcaccgttcgcatacgcagagaatgctttcgatgcattctctgcgcgggctcactttttttcggcccggactgccgaaaaaatctcctgcgggaatcccggttttgcctaagactctctgctcactcctgcggaatcgtccgcagaacacaggcgtcctactcccaagaaccatcctcccgcacggactctccctcacctgtatattggaaagttccaggtagctactatataggaaaagaaattataggtataaaaaaagtgtagatgtcagagttcattactctcaaacaactacacttttattatgtgaaataaactgctaattgaactaaaaccctacaacttacgaccattaccccattccaaataaatgtaaaatgagccgataccagaatatagaagggaggcgcggggagactggggcatgggcaggtcagggaggttaagcggagtgagccgaagatccagtccaccagctgtttagcgaggaaggctctcctgacgagcttagcagctggtagggcttagctgaggggagcggagcctcgagctgaacctgcccatgccccagtctccccgcgcctcccttctatattcgtccgtcttattctcattttgcccccgaactttccattaagaatgcgtaaccgccctctgataatacctggacgtcaacttggacaaaattccatacaccggcttaaacagcaccagggtaatgactacatttcccacacagtggagaatatctgaagggattccgctgatccagtatgcgattccgcctccgacgcctgagatgatgaagtaggggaacgagcagaggaatccgaagcccaggccgaaggcccctgagatgatggaccacatgaccggggagtcgtttttggagcagagcatggtgatcactgccaggatggtccagacgtagaggtacatgaaccaccagattccaaagccgtatatcataccttctaaaaatgcaaagatgtagataatataaaatacctttttcctgaagagaagggtatagatgatgataaggagagaaaccacttctatattatgaagaaaggccattcccacctgacccaccagaagtatggctgtgaggaaggccaggattaccatatcttttactttagtattcataaaatatcatctcctgtctagccggcagtataggtaagttcgtagtgctctccgtcttctataggagtctggtcagcggaagtgttcagcatttccccgtccttggtgatacaccaccagtctgtgccctctactgactccccgtcagctgcggtaatgaagagaccatattgaccctcctccccttccacaagcttttcttctgtgatcacttcacccagatattctttatctgtgtggtagacaaactctttggaggttccgtccttatggacaacctcaacggtaacttctttacttccctgggaggtcttaggcttcatagaactgctcagcaaaaacagtgcgcctataagtaccagcagggtgatggcggctgtcagtatctgcgctttattcggcttctttttttcagtcataaacataccttccttcctatcctttatatttgttctatattgtctgcaaagccatggcatctttcacatgacggatgaagagctggcggatcccggggtattccccaaggcctttcaggacagaggagactgtaaagccagccttttcaaactgacagcgccaggattcaggatcgtcgcttgccatatcatttctggcatggtcccctgccacaatcataaacggagccagtactaccttttggggctggtattctttcaccattcgaagaaggctttccatggacgggtaagcctctacggtgcctaaaaagaagtttttgtatccgtggtctttaaactgatagtccagggccgcatagattgcgttggaataatgagtggtcccgtgccccatcagtaccagcacctcatcttccggaagcgcagagaattcgtccacaatggactgaattactgcaaggttatcttcctctgcggtcaggagtggtgtaccgaaagtgatagtgtggaagtcttcctgataggagagtgcatcctccttcatcaggtcattttcaattccattgattacgtgggtgggctggacaatgacatccgtaatcccgtcttttctcataagctccatggcttcctttacatttggaattatgaggttgtcccgtttggccagctttgcaagtatcattttactggtccatgcccggtaaattttatggtccgggaaggcttgggcgatgtcggcttcaatggcatcaatggttacttttcttgtctcttcatagctggtgccgaagctgacgactaaaattgctttgttggtttcgcggttcataaggcggcttcctccgtaaaatgttttttcatttatattttctatgtagccttccagtgttttcagatctctgggaaggggaagagagggttttaagattcctttcttacatagactctcaaacagctgcagtacagccggctgttccaggttagtcatggccagtgcagtgtggttggtaaagacctccagaggcgaaccatgtatcaggactttcccctcgtgaaacagggcgatttcatcggcccattccagggcataatttacatcgtgggtggccattaagacggtgattccattttccgtcagctgatttacaatcttatttaccatggtggtatgcctgggatccaaagcggctgccggctcatctaaaataatgacttccgggtgcatcacaagaatatcggcgatagagacctgttttttctggccgccgctcagcgcatgggttggtttgtgccggaagggagtaatctccaggtagtcaatcacattctctacttcttttttggcttcctcctctgaaactccaaggttcaggatcccaaaagagatttcctggtagacactggcggaaaaaagctgattgtccgggtcctgaaagataattcccaccttgctccggagctttaaaagcccctcacgtgagtaatcaaaaggttctccgttcaggtacaatttacccttcgcagggcggttaatcccattgcagcagagaaagaaggtggactttccggagccgttggcacccataaatgccactttctttccccgccggatctcaagggagagaccgtttaaagagtgggtattttcatcatcataagaaaagtacaggtcttctgctttcagaataatatcattcatatatgtaatctccatatcgtaacgccgagcaggaagcattcaaacaatacaatatatattatttcgttggctttcggcggataattttcgttcagaactctgagtttgccgtcatagcatctggattccatggcatcgtacagggcattggattttttcatggcccggataagaagaacggaagccaatgccccgaaggatttcagcgacgttttaaagtctttattacccaggcgggaatcctgagcggtggagatagcagaggatatctccattaaaacaaagataaagcggtagatcagcatcatcagctcaatcaccagctccggacagtgtatttttcgcagtacgagaagaatgtctgtcataggagtgttcaaggagagaaagtacaggcaggagacactggcgagagctgttgctatgagctgcacggcaaatgccagagatgcccggctgcctgttatataatagcttcctacggaaagagcgaacgcgtccaggggagtcctggatatatttacaataatggcaagtgtacttaagaataaaaatgccagaggaatcatgagaagtttccgataacgagaaagtgggatcccccctttcttaacagtgagaatcccatttgccaataataccagaagtgccacagcaatcgaacggctgacaacgcagaaaagcagcgtgataatagaatatatgaatttttcgcttgcatttacgtaccgtaatttcgaataatagcaaagcttatctatgacaatcatgataaaattcctttctcgtcagtgggttattgtctgcccaattccttctgcagctttttcctctctacaaaccgtcccataaagaaagacaggatgcccacgccgattccggtctgaaggcagaagataagactctctacttcaccggggagctcgcctcccagcatactctccagcacaggtgtaaaccaaggttcgtattctccgtgaatctcttcaatcatctgacttcccgcatcgtcggaacctccaaactcagcaccctttaatgcaaataaaggtacaatggcgatgagtgccgccacaatcagcaggatgacaacggtttttgtgtttttactcatgagcttttccctccttgataaatccgatagacttcagctccggcagtgcaaatgattccagaccaatcataatgattacggtcagaattccctcgatcactgcgagaggcatttgggttggtgcgaagatacccaggaactttactgcagaggcagcgataccgccctgttcagagggatatgccacagccagctgtatgctggtaacgcaatatgtaaacaaatcacccaggcaggcagccaggaaaatagatactttccggtttacatttaacttctggcagagcttgtagatgccgtaagatacaaaaggtccagcgattgccatggaaaatgtattggctcccagggtcgtgagtcctccgtgagccagcagaattgcctggaagagcagtacaatgatccccagaatgctgactgcggacgggccgaacaggatagcgcccaggccggtgcctgtcatatgggaacagctcccggtaacagacggaatcttcaaggaagagataacaaacacaaaagcgccggacatagccagaatcgtcagagcccttctgttttccctcaaagtctttcgaatggaaaagaatcccgcaattacaaagggaacgcagatcactccccatgcgatacagaatgttgccggaagatagccttccataatgtgcatagcacttaccaccggtgtgataccaaagcagagggcaaatgcggcagccagtgttacaacttttttttgcttacttgtcatttttctttctccttttctcaagttgttgtgacattactgtaacgtggttcaagagtaaaagaaaagcccagtagtatatactactgagcgtctgagaacagattccggtcttgataggggctggcccctgacggataagaaccgttcttacactcagccatcgttcgtaactaaagtgcaaatcgcttgtgacaggcaggtcttctgacttagggggtcttcattgaatttcgccttcccagttatcccagtgacataaatgaaattcaactcgtcccatacagcggcgtgaccgtgtgagcttttactcactttcctattaacccgattgctcaggaccatatcacactcaattttagcggaatactccgcataccgaagatctgaatctggcattgtcagatctgcggacctattgtcattctatactttcgatagtaatttgtcaataactatgacccattcttttccaccccagtaccctcattggctggcctttacaaatttctatttgatttttctcactcatatgctattatgaaaaaagattgacacaataagagaatcaggagaaggatatactatgggaatatgtatgctgggtattgaccacaaccgagccttactggatgtgcgtgcccttttttcatttaccaaaaagaatactgctgaggcgctggaagtactcagggaaaaagaaggaatcctgggctgcattattttatctacctgcaaccgcatggagatttgggccagcaccgtggaggactgggacggttccctgtacgactgcctcttggagttaaagggagcagagtctggtaagtacagagagtattttgtggagcgtaaggagaaagaagcggtagaacatctcttttacctgacctgcggtctgaaatcacagattttgggagaagatcagattctgactcaggtaaaggacgcgctggctctggccagagagaacttcactacagacagtgtgctggaggtgctcttccggatggctgtaacggcgggaaaaaaggtgaagacagatgtaacattctccagagggaattcctctgtgattcatcaggccattaccatgctggaggatgagggattccgccttcaggacaaaacttgtatggtaatcggcaacggagagatggggaaagttgcggctcaggcgcttcgggaagcaggtgcatacgtgacggtaacggtccgtcagtaccgcagcggtattgttagtattccccagggctgtgcccggattaactatggagagagaatggactatcttcctcagtgtgatctggtggtcagcgctacggcaagccctaattatacgttaaaaaaagaattgtttcaggaggcagtgctgcccgcagatctgcggattattgatctggcggtgccgagggatgtggagccgtcggtaggggaactccctgagattacactatatgatatggacagcttccgtatggagggaacgccggaggagctttcccagagtctggaacaggcgggagagattctgaacacacagatggaggaattttattcctggctggaaggtcgggatctgattccgaggattcaggagattaaggcagatgcggtgcaggatctgaatctccgtattctgaagattctgaataaaactcctatggaggaaaaagacagggaaaagcttttgcatactattgatacggcggcgggcaaagtggtgaacaaaatgatattcggactgcgggacacgcttgaaaaggaagcctttttggagtgtgtggcaggattggagaaggtgtacgatgattaatcaggaaaaaccatatttccccatgtttgtagatctgtcggaaaagaaaatccttgtggtcggagcaggaaaaatagcggcccgaaggattcaaaccctgctcccttttgccggggagatacaggtgattgcccccagggcggaggcagcagtggcagaaatggcaggaaaagggatgatccagtatgaggccagagagtacgaaagagaggatttatatgatgcctgtattgtcatagcagccacagaccgggaacaggtaaataatgagatttacagtgtctgcaaatgtatgggcattccggtcaatgtaatcagtgataaacagaaatgtgatttttattttccgggaatcgtccagagggatgagattgtgataggcgtcagcgccagcggaaaggatcataaaaaggcgagaaaaatgcgggaggatatcgccgcatttttacgggaagaggagaaggtatgagtaaaaaaaggatcgttgtgggcagcagagagagcaagcttgctgtcattcagagcgaaatggtaatagagtatgtgaaggaagcgtacccccaggctgaggtgagtcttctcaccatgaaaactacaggagatattattctggaccgcacactggacaaaatcggcggtaaaggtttatttgtaaaagaactggacaaagccttgatggagggacgaagcgacctgtctgtgcacagtctgaaggatatgcctatggagattccggaggaactgcctattgtggcgttttccaaaagggaagatcccagggatgtcttgattcttccggtgggagagacagagattccggaggggaagcccatcgggtgctccagccagagaagaacccttcagctgaaggaattattcccggatattccctgcaaaagtatccggggaaatgttattaccaggctttccaaactagactcgggggaatacggggcactggttctggcggcagcaggggtaaagagactggggcttgaggacagaatcagccggtattttgaacctgaggagatgatccctgcggccggccaggggattcttgcagtccagggccgtgcggaggaggattattcctatctggatgggtaccgggattcggaagctacctgcgcggcgcttgcggaacgggcatttgtacggtatctggacggcgggtgctcttccccgattgcagcacatggggtggtaaaagaagggagaataacgctcacaggtctgtattactgtgaagagacaaatacatacagaaaaggcagaatggaggattcggccgaacacgcggaagaactgggaattgcactggcaagaaccctgaaggaacagacaggaggtacacagtaaatgacagcaggcaaagtatggttagttggagcaggaccgggagacatcgggctctttacggtaaaagggatggaaaccttaaaaaacgctgaggtagtggtctatgacagcctggtgggccagggagttctttccatgattccggataccgccagatgtattaatgtgggaaaacgggcggggcaccacaccatgcctcagtggcagattaatcaggtgcttctggatgaggctaaaaaaggataccgggtggtgcgtctgaaaggcggggatcccttcctcttcgggcgcggaggagaagaactggaacttttaagggaacatggaatcccctacgaagtggttcccggagtcacctcccccctatcggttccggcctataatggaatacctgtcacccacagggactactgctcttccctgcatattatcacaggccacaaaaaagcgggagaaagctatgacattgattttgaggcattggtgcgcaccggaggaactctggtatttcttatgggggttacagccctggcagatatctgcagcagtcttctcggcgcagggatagaccctcagatgccggcggcaattcttcaaaagggtaccaccgcagggcaaaaacggattgttgccacggtatctaccctgaagcaggaggtagacaggcagggaatagagacaccggcaattattgtagtgggccgggtgtgcgagttggcagaaaagtttgcctggtatgaggaactcccgctttttggattcaaggtcctggtaaccaggcccagagatcttatctcttccatggctgccagactccgcagaaaaggcgcggaggtgctggaacttcccgccatacggacagaagcgctggagaatcaggaacttctcatccgtgcatttgcgcgcatggacacttacgactggattgcttttaccagccccaccggcgtaaaggttttcttccaggagatgaaaaaggccaggatggacatccgtgctctcggcagagtaaagattgccgccatcgggacaggaacaaagagagagctggaggaacggggactgtttgtggatctaatgccggaggtatacgacggggcttctcttggggctgccctggcagaggcctgccggggaggggagcatatcctgattcccagggctaaaattggaaatcatgagatcctggaggaactggagaaaaaacagaacctggtcatcgatgatattccaacgtatgataccctgtatgaaacctccgagattattgatgagaagaaagaatttgagatgggttccattgactgtgctgtgtttaccagcgcctccacggtaaaaggattcgtggaggcaacgccgggtctggactacagccgggttacggctgcctgcatcggaaagcagacaaaagcagcagcggaccgctacggaatgcagacctatatggcagagaaggccaccattgacagtgtaattgatttggttataaacttaaagatgaaaaaggggtgctgaaaacatggagatgattaaacgaccaagaagattaagaggaaatgaggcaatccgaaaaatggtcagggagaccagaatggataaaagctctctgatctatccgctgttcgtaatagacggggaaaacattgaggaagaaatcccatcgatgccgggacagtatcgattcagcgtggaccggctgccctatgagctggagcgtctcaccaaagccggggtggaaaacctgatgttatttggaattcccgcccataaggatgagatgggaagtcaggcatatgcagaggatggaattgttcagcgcgcactcagggaagggaaaaaacagttccccggtctctattatattacggatgtatgtatgtgtgagtacacgtcccacggccactgcggcgtgctctgcggtcaggatgttgaaaacgatgccacacttgaacttctggcaaaaactgcgctgtcccatgtgcaggccggagccgatatggttgcgccttctgatatgatggacggccgtatccttgcgctcaggagatgtctggacggcaatggcttcaaggagacccctatcatgtcctatgcagtgaaatatgcctctgccttctacggaccattcagagacgccgcgggttcagcgccgtctttcggggacaggaaaagctatcagatggatttccataacagaaaagagggaatgaaagaagcgcttatggacgtggatgagggcgctgatattattatggtaaaaccggcgctttcttatctggatgttatctcacaggtatctaaggaaatcaatcttcccatcgctgcctacagtgtgagcggggaatatgctatggtaaaggctgcggctaagatgggatatatagatgaggctaagattatctgtgagatggcggtcagcacttaccgggctggggcggatatctatcttacgtattttgcaaaagaactggccggatatatggccgaagggagaattggataatgacaagatcacaggaattatttcagagagcggttaactatattcccggaggagtgaacagccctgtgcgcgcctacggggccatcggagagaccccgcgctttatacagggagcggtgggaagccgtatatttgacacggacggcaattcttatattgatttcatcgactcctgggggcctatgattttagggcacaacaatgaggcggtcaaagagagtgtgatcaaggcttgtgaaaacggcttaagctttggatgtgccacagaagtagaagtggatatggcggaatttatctgtgagcatatccccaccattgatatgatccgaatggtaaactccggtacagaagcggtgatgagcgcaattcgcactgccagaggatataccggaaagaataaaatcattaaattcgcaggctgttatcacggccacagcgatgcgatgctggtgagcgcaggctcaggggttatggccagcggcgttccagacagtgccggtgtgccgaaaggatgtacagaggataccatgcttgccatctacaacgatctgtccagtgtggaggcactgatgaatgaatgccgggatcaggtagccgcagtaattgtggaaccggtgggcgccaatatgggagtggtgcctcccgcagagggatttctccagggacttcgcaggctttgcgatgagcacaaagcgctgctgatttttgatgaggtaatcacaggattccgtctggcctttgaaggggctgcaggatattttcatgtgacaccggatctgaccacatacggcaaaatcataggtgcaggcatgcctgtgggagcctacgggggaagaagagaaatcatggagatggtatcccctgttggtccggtataccaggcaggtacgctgagcggcaatcctgtggccatggcagcagggctgacacaactgaaaattttgtatgaacatccggaaatctatacaaacttaagagataagggagaaaaactgtacggcggcatccgtgagattctgaaagaaaagggggctccctgtgtcataaactatattggttccctgggatgtgtattctttacaagagagcctgtcacagactatgcatctgcaaagactgcagatacaaaggcgtatgcagagtatttcaaacatatgctacgttcgggcattcatctggcgccggctcagttcgaagccatgttcctgtcagatgcccacacagaggaagatatacaagcaacattagaggcagtcagaaggtttttctgacagattccctttaggggacgggaggaatggtattctcccgtccccaagtgattttaccggcagagaggaggcagaaaatggaagaacaatttgtatttgcgggactgattctctgtctgttcatcactgtgattactgtgatggccagagataacaaaaggcagagagggcaagtcagagataaaataaaagaaatgtgggggaatataccaaaaaaagagtattccagggatctactggactccatatcccattatttcatgcgccgggaaagcagggaaagcggcttttttctggatgatattacctggaacgatctggatctggacagaatctttatgctaataaaccagaccatgtcatctctgggggaagattatctttactatatgctgagaaaaccggaatttgcgccggagaacttacaggaacggcagcgcctggcagattatttcaggggacatcaggaagagagagtgcgcctgcagcttcttctgggaaatctcaagcgtcttcccacggtctcgctgtcagattccctgtatgtactcacagatgccaaagaacataaaagaagaaagcacattgcctgtgcgcttttgatgatccttagtattctggttatgattgtcatcccaaaatatggagtctttctcatgctgggcatgatggtttttaatgtgattcagtatcttttcagcaaacaggagatcgagacctatctgtcctgcatccggagcattatgagactcctggaagcggcaaaagaaacctctaagcttcctatgccggagctgtcggagtatctggagcggataaaaagggccagaaatgaacttgggcagttcagcagaggggcggggcttgtaatgaacagaagtgacgcgggcggcggtctggagacgattattctggactatatccgcatgatctttcatgtagacatgataaagtttaacagtatgctcaaagaacttcagaaacactttggagcggtggaaacactgatggagacgtttgggtttctggacagctgcatcgccttggcctctttccgggaggctatgccctatacctgtatcccccagtttgaagagccagggaagcgtgccaccatggaggtgacaaatctgtatcatcctctcatcaaagaaccggttgccaacagtatttccgtagcaggaggaaccctggttaccggctccaatgcctccggaaaatcaacgtttttgaagaacgttgccgtgaatgccatcctggcacagacgattggactgtgtgtagccacagaatacaaaagctgctatctgcgggtaatgacttctatggcactcagggatgacctgcagagcggtgagagctattatattgtggaaatcaagtccctgaaccggattttagaagccacccgggagactacaccgctgctctgtgtgattgacgaggtgctgaggggaacgaataccattgagagaatcgctgcatcctccaatattctggcagctctgtgccgggatcacgtcctttccttcgcggcaactcatgacattgagctgtcctatatgctaaaatcgctgtacacaaattatcattttgaagaagaggtcaaggagcacgatgtagtcttcaactatctgctgaaaaagggccgggccaccaccagaaatgccatccggcttcttgagatgataggctatgaccaaaagataatagagaacgccaaacgggcggctgaaatttttgagaaaaagggagcctgggctcctgtgaaaaaagaggaggggcaatgttagtaaaaatatatacagacggatccgccagaggaaaccctgacgggccgggaggatacgggacagtccttcactatacagacagtaagggacagcttcacaagcgggaatactcccagggatataagcgaaccaccaataaccggatggagctgatggctgccattgcaggcctggaggcgctgaaccgtccctgccgggtggaactgtattcagattccaaatacctggtggatgccttcaatcagcactgggttgacagctggctgaaaaagggctggaaacggggaaagaatgaaccggtaaaaaatgtggacctttggaaacggctgttaaaagcaaaggagcctcaccaggtaacattcatctgggtcaaaggccacaacggccatgaggagaatgagagatgtgactttttggccacccaggccgctgattccggggatctcatcgaagacacggtgcaagaatttggcttgaaataggcgttatcctatgatatgattaacgacagaaaatattgcgtccgacaggatatgattcatatagaactccggaaaaaggaccaaggatgaaaacaggaggtaataacaacgtgcagaaatatggagtaaatgaacttcgtaaaatgtttttagaattttttgagagcaaaggacatctggcaatgaagagtttttctctggtgcctcacaatgacaagagtctgcttttgatcaattctggtatggctcccttaaagccgtactttacaggagctgaggttccgccgagaaaaagagtgacaacctgccagaagtgtatccgcactggagatattgagatagtaggaaagacagcccgccacggtacattctttgaaatgctgggcaatttttcctttggagattattttaaaaaagagtccatcgcgtggacttgggaatttcttacggaagtgatcggcctggaaccggatcgcctctatccctctatctacctggatgatgaagaagcctttgagatctggaataaagatatcggaatcgcacccgagcgcatcttccgctttggaaaggaagataatttctgggagcatggggcaggtccctgcggtccctgttccgaagtttattacgatcgcggggagaagttcggctgcggaaaaccggactgtaccgtaggctgcgactgcgatcggtatatggaagtgtggaataacgtatttacccagtttgacaatgacggaaacggaaattatacagagctggattataagaatattgacaccggtatggggctggagcgtcttgcagtggtggtgcaggaggtggattctatcttcgatatagataccatagaagccctgcggaacaaggtctgtgagattgccaaggtgacctataaggagaatgaagagcaggatgtctctattcgtctgattactgaccatatccgttccactacttttatgatctctgacggaattatgcctacaaacgagggacgaggctacgtcctgcgccgtctgatccgccgggcggcccgccatggccgtctccttggaatcgaaggccgtttccttgcaaaattaagcgccaccgtcatcgaagaatccaaggacggatatccggagctggaggaaaaaagagattttatctttaaagtcctgaaccaggaagaagagcagtttaataaaaccattgatcaggggcttcgtattcttggagaattagtagataagatgcaggcagaaggaaccagggaactgtccggggaagatgcattcaaattatacgatacctatggattccccattgatttgacaaaagaaatcctggaggaaaagaattataccatagacgaagaaggattccgggaagcaatggaagaacagcgtcagaaggccagaaacgccagggaagtaaccaactatatgggggctgacgcgaccgtatatgacagcattgatcctaccgtcaccaccgtatttgtgggatatgataaattagaatacgaatcagaggtaactgttctcaccacagaggcggagcttacagatgccctgacagacggccagaaggggacaatctttgtaaaagaaactcctttctatgcaaccatgggcggccaggaaggtgataccggtaccattacagttggagataccatcttccgggtagaggataccatcaaactgcttggagacaaagtgggccatgtgggtcatatcgtcaaagggatgattaagacaggagataaagtaaccctcagagtatctcccaaggggagagccaatacttgtaagaatcacagcgccacccatctacttcagaaagcgctgaaaactgtgctgggagctcacgtagagcagaaaggttctctggtaacccccgacagactccgtttcgattttgctcacttccaggctatgacccaggaagaactggataaagcagaagcaatcgtaaatgaagagatccagaaggcacttccggtggaaacacagattatgaacctggaagacgcgaaaaaaacaggggctgtggctctgttcggagaaaaatacggcgatgacgtcagagtggtatccatgggggactattccagggagctctgcggcggaacccacgtgccaaatacaagcgccattactacgttcaaaatcatttcagaggctggtattgccgcaggtgtgcgccgaatcgaggcactgaccggcgacagtgtttttgcgtattataaaaaaattgaagaaaagctgaaagatgccgcggctatgctccggacaactccgggtgaggtttcagaaaaaattggccacctgcaggctgagataaagactcttcacagtgagaatgagtctctgaagagcaggctggcacaggacgccgtaggcgatgttatgagccaggtgcaggacattaatggcgtaaagcttctggctgtggcagtggaagatgtagatatgaacggcctgcgggacctgggcgatcagttaaaagagaagctgggagaaggcgtcgtaattttggcgtccactatgggcggcaaggtaagcctcttagctatggcaacccagggagctatggacaaaggggctcatgcgggcaacctgattaagggaactgcagccgttgtcggcggaggcggcggaggccgtccaaatatggcacaggccgggggcaaaaaccctgaaaaagtgccggaagcgcttgagacagcagcaaatctgctgagagagcagctaaattaaagaaaaaataaaaaaaaacttcgaaacaggttgacgaatgggaaaaatctgctataatatttttgtgcagtaaaaaatacccagacagttgtattatgcacaatctacaactggagggaggttaggtgtgagactatgtcaaatgttatcgtaaaagagaacgagactttggatagcgctttacgcagatttaagcgtagttgtgccaaagccggcattcagcaggagattcgtaagagagaacattacgaaaaaccaagcgttcgccgtaagaaaaaatctgaagccgctagaaaacgtaaatataattaatgtgcagtaaaagtccttggcttgttgccagggacttttttacagaggaacggtgcgggtatgaagaaattaatcaaactagtttttagccggatattcgtagtagctctggccattctgctggaattggcgtggattgccgctctggtctgggggatcagtgcaatctctacccatgtggcaagaattatttcaattttaagtctgtttttggtattgtggattgtaaacaaaaaaatcaatccttcttataaattagcctggacgatactgattctgaccatcccctttttcggggtaaccatctattttctgtttggaaagtccagaattgcaaaaaaaatgtccagggaatttcagtatgttttaaaccgcatatccgatctgattcaggaggatcctgaggtccgcgccgaactggaggaagaggacaaaggcatctccaaccagtctcagtatatcagagatcatgcgggctttcccgtttataaaaatacaattactgaatactattccgtgggagacgatatgttcccagcgatgatcgaggaattagagaaggcgcagcactttattttcctggagtattttattataaatgacggccgaatgtggcagaccgttcttgagatcctggagagaaaagcgaaagagggagtggatgtcagattgatatacgatgacatgggctgtgcaaccacacttccctatcacttttataaacagcttcagtcaaagggtatcaagtgcgcttcctttaaccctttgcggcccattctgaatatcatactgaataacagggaccacagaaaaatattggtaatagatgggcatacgggctttacagggggtattaacctggccgacgagtatatcaatgaaaaggacagattcggccactggaaagacacaggaattatgctgaagggcgaggcggtatggaacttcacggttatgtttctgcagatgtggtgtgtgattacgaaaatgaagtgtgactttaaggagtacgagcctcacgtgtatcatccgggcccctttgccagcgacgggtttgtccagccctacagtgacacacctctggacgaagagattgtgggggagaatgtctatctgaatattatcaaccgggcgaaaaaatatatttatatctgtaccccgtatctgattatagacaatgaaatgatgacagctctgtgtctggcatcgaagagcggtgtagaggtgacgattctgactcctggtattccagataaaaaaatggtatttctgctgacccagtcctactatgaacagctgctggaagcaggggtaaaaatttacgaatatacccccggatttcttcacgcaaaatcatttgtgtgtgacgacgaggtaggcgcagtgggaaccgtaaatatggattacagaagtctttatctccactttgaatgcggtacctggatgtataagagcaatgccattatgcagattaagatggatatgctcggtatgctgccaaagtgtaaagagatcacactggaattctgcaggaacagaaatattgttgttcggggaatgcagagtatactgcggctgtttgcgccgatgctgtgatgatcttaacgaaattttaacatttctttaatttgcagatggattgctggtattttacggaggtctatgataaaatgaccaagtaaactaacaccgtctgcatttttagatagaagggagtagttttatgtggacaagaactttatttaatacggacttatatcatatcgttcactggttcctgatttatagtatacttggttggattgtagaatctatctacatgtctgtatgcaataaaaaactgactaacagggggtttgtgaaaggtcctatctgccctatctacggcgtgggggcattaaccgtctattttctgctgagacctttctcaggtgattattttctcctctacgtccttggatgcgccatacccacagcgctggaatatctgaccgcccagctgatgctctccgttttcggggaagtctggtgggattactcagaaaagccttacaattacaaaggtatcctctgcctggagagcagcattgtttggggcttttatacggtattgctattcgtttttctgcagcggggcgtggaagcaatcgtaaacagctatcccttttccgtgggaagagtggtaggctccatcgtactggcaggttttattattgattttatacatagcctgtacaatgcaaagagagatgtactcccgggaagtttcggagaattaaaagactctataagggaattctgccagaggtaagagagggactgccgattatgacaaagaaggcaaactgcgaatgctgcgggaattatgtatatgacgaagaatatggatattatgtttgcgagatggatttagatgaggatgaaatgctccggtttttaaaagggacgtttggaaactgtccttattttcagtatcaggatgaataccggattgttcggagacagatgtaggataggagaaggactgctttgagtggcggtccttttttagttgtgaggggacggtgataggatgctcttggcggtgggctggctggttcggacgggagggaggcttaagtcccgcggacacctccgtcgcgaagagagtctaagacaaaaccggaattcccgccggagcaccgttcgtatggtcaaagaatgctttatgtgcattctctgcccatgctcactttttttcggccctgactgccgaaaaaatctcctgcgggaatcccggctttgtctaagactctctagtcactcctgcggaatcgtccgcggaacttaagcctccctcccgtccgaaccagccagcccaccgccaagagcatcctatcacctgagtatgggaaagctcagggggaggtttttgtagaacgaggaacgagtttgtttataagtgagaatgaggttgtaatactttgccggagaatatacaataaatgtgaaaatactgaaaggagcaggtatatgagaaatagatatgttatggctcagtagtctgagtttaaaataaatacgaatcgttaagctcagatgaatccccatagtaacaggaggattacaatgagctatgttagagcagaggatattctgcccaaagaattaatagaatctattcagcaatatgtaagcggagaaagtatatacatcccatgtaaagagaaaaagatctggggaagccagaccaagacaaagcagtattatgaaatacgaaatcatgaaatatgcaaaaagcatagcatagggttttccataaaaaaacttgccaatgaatattccttatcagaaaaaagcatccaaagaatcatacgaactactatctttacggatgaggctgccccatgaaagtgtcttctctaaaggtgtatcatcactgtgggggatgcaaaaaaacgcaggagttcattaattcagggaaattcagagtaaatgcaaacggtaataaagtagatgtatggcttatatacagatgtaaaaaatgcaaacatacctggaatttaacaatttacgaaaggataaaagcctcaaaaataacgcccgcagagtatacattatttatggaaaatgattttagtcttgctgccagatatggaaaggatataaattttttgacaagaaataaagctgaattcaggtaggatggtaagccggatagtgtgctatccggctttgtgctaccttgaagtggaactgtttttcaatgccgaataccccatccagaccatccagacatacgcacaagtttttgggatcatcagtgcgccgatgggcggtatcttgccggctaaaagtaccaccggcaggtagcaggcaaagctgatggcaatggcaagccacataaaacggaatgcctgatcatgagtttcctttgcctttttgtagaacagaactaaaacaatcactccaagtattgagaatggaatgttgcggtagatgccccagctcagtggcgcgtcgggactcatccaacggttttgagggaagaggcacagcaggattctcaggaaggccagtacgtagactgtaatgcgcagagaggatacgggagtctgccggtaacgtatctcccagatatgatagaggagtacgtaaaatatggtcattgtaatggaggttactgcctgcccaaaccccagaggggcgaaagctgcgtccagccctacggtatgcattgcccagactctgggaaccagatgaaatgcatccccgcatcctaatataacggccatcagtccaaagagccagtattggcttttccggggcgatgactgcatcatctttctcccaattgtgattactgtaatcaaataaacaatgtcaaatatagtttcccctaatatcattgtgaaatctctcctttcgttaatgccgggtgcggatatcttgcaaactgaaaaataaagctgactcccgcaagcagcagggaagtccccagtccggtataaaatacggcaataaatgtatcagatacgatgcctgaaacgcgaagaccgatgccaaacgtcatcatgaaagccataataccataagactgcttgttgaaaaaacggtagaagggctgccgggattccagatagccatggattcgccgggtatgctttttaaccattcttcgaaatacaagaaagtgaaacagcaaaagtattgtaaagcttgtgactatcatccacagattccagacaggaactctggctgtcacgccgattcggaagatattaattcctgctccaagccagactaagccggcaattaaaagtaaaaattttttgtgtatcatacactgcctccttttgatgaacaatgttcatattagcgattataacagcggatccttatgagagtatcagtacaggatccgctgcagggtttttacaaaaaaggtacagtccttttgacctgtcctcagcatctggaccatatgccaaaatacaaaatctataaattcatcctttggatattcctctgaccagactgttgcagggattgacggatctgaagagagtacctgcaacagcagagacttcagatgtctgaaacattgaagttccagttcttttccccgttccttgtcttctggtgccatggtctccatctgtgtcagccattccctctgaaaatcagacagactgacattcatctgatagtaaaactgttccacatactttgtaaaacagcagtcttttacatgaatatcctgtaacatggaactgctcatttcccaaaaatgggacacgaccgcaaaaatcaaatcagctttggtgggaaaataattgtacagtactcccacagaaatagaacacttatgtgctatatttcggatgctgactttatgaactccctcttcccgggcgatttccaaagcggcagcaacaagctcttctttggaagtaacgtttttattcaagtcttcacctccatatgaacagtgttcattatatgcctttctctcttgtttgtcaagacgctttttcttattctctgtcttactgcataccttgccaatccgtcaggtttcctgtatacttaatttgactgttactataagttagaattcagccgttctctgtgaaattaccgagcatggaagaaacgaccgggaggtagaagattatgtttcatatttccaattttactgacaatgatgacattaagacactggcgtctcttggaccctttacagtaattgaatatgagcgggatctaagcgttatgcccagtgacgcgcagactgcttatttctgcaatgcaatgaatgtacgtaaacgacaggtggtctgcgatctcagcagagcaaatattactctgcaggcgggtgctatgcagtggatggtgggaaatgtcaatgctaccacaggcatcaaaggcgtaggtgacctgttcggtaaggcggtgcggggcaaggtgaccggagaatccgccatcaagccagagtatacaggagatggtattctagttctggagcctacataccggcatatactcttgttggatcttcaggactggaatggctctgtggttctggatgacgggctctttctggcctgtgacgccaaactgaagcataaagcagtgatgcgctctaatgtatcctctgcagttgccgggggtgagggattgtttaacctgggaatcagcgggagcggagtactttgcctggaatcgtcctgtcccagggaggagctggttgagattgcattggaaaatgatgtcttaaaggtggacggtaatatggccattgcctggagcggcagcctggactttaccgtagagcgttccggaaaaacactggttggatcggcagcatccggggaaggactggtgaatgtataccggggtaccggaaaagtcctgcttgcgccggtagaaaagggaattgcctaatgaataagtgaagaaggccctgcacgtctggtggatttacggacgtacagggcttttgagatcttcatcagaaattcatacgcatctgttacaataaggagcaggaaaaggaaaggtgtgagcatatgaaaaaaatactgttcatggaagatgaacctacaatccgcgaggtcttagcggaatatatgaaaatgcaggactatgaggttacagaagtgcaggacggcgaggaagctgtaaaggctttagaggaatgcctctatgatatggctgtgctggatatcatggtaccgaaaaaaaacggtctggaggtactttgccatattaggaagcagtttccggatatggcggtcattatgcttacagccctgggggatgaacagacacaggttaaggcatttaatgcctatgcagatgattatgtaatcaaaccagtgtccccgattatacttctgaagcgcatggagaccatactgaggcgttccgccagaaccacagtccaggcagaacgcgggctggtaatccaaaaggaagcgtaccaggccttttataacgggaagacactggaactgacgctgagtgagtttttgctgctgcagaccctgtatgaaagaccaacccaagtatttaccagagaacagctgattctcagaatatttaacgaggattacatcgggaatgacagaattattgatgctcacataaaaaatctcagaaaaaaattgccccaaaactgtattcgtaccgtgattggtgtgggataccagtttgatgcttctcaggaaacatacggaggaaaataaaatgcgcctgtctaaaaaaacgttcttgtacagtattatgatctctttggttttagtactttttgtgctcctttatttcatattcatgcttccatccctctatgtagaatatacagggcaggaatatctggaatctgttatccgggtccaggagggatacagtaaaaacaggagttatcagggtctggaggtaagaaatcccacgggttccgcctctttagagattcctcttgagggagacagcatctatctggcgggaaaggcgttccggctgactataaatattaaagatcccaaacttttaaaagcagttgaacagttgagagattctgtaaagaatacggaaagctttgccgattttgagatgccggatattgattttgaggaattaaaggagagtatgcaaatggaggacggagggccgctttcagatatactatcctttcagatggatacagatgaagagttacaggacgttaagacaaggaaaggcaaagttcatatcattactgattcgatggtagtttttgaaggaggaatgaatgacaaagacaatgattataccacatatatcgcagcggggaagacaaaggatgcactcattttttcctttctgcctgttatgacgcctcagatgaatgagatacagcccatcgttttggggagtctcccaatgattgcggctgtggtatttctgctggtactcattgcctcccagattttttcaaagaagattgtcaatcccatcatacggctggcaggttatgcggaggatgtgaaagaagcaggatacagggagatgactccgctagaaatccatgaaaaagatgagattggagagctgggaaccatattaaatgagctgtatgataagctgcgtctgcagtaccaggagcttgaggcaaagaaccggtcactggccagggagaacaaacgccaggaagtctttcttcgggcgacctcccatcagctgaagacacctatcacagcagcgcttttgctgacagatggcatgatctccgaaataggaaaatataaagatactgggaaataccttccggaggtgaaaaagcagctgctctcaatgagaaagatggtggaggacattttgtatctgaatcattcggcatataacattcagagagaattcgtggatatgaatcttctgctgaaagaagtgctggaaagctaccggataccggcaggagaaaagaagctgatcttccactgtgaagagcagcccgtactggtagagtcagacagagaaattatgcggaagattctggataacctcatctccaatgcagtatcctacactccgccaaaaggagagatcgccatacacctgtctgaggattcttttgaaattttcaatacaggagcccatattgaggaggagctgcttccccatatctatgaaccctttgtgagcagcgataccagccggaaaggcaggggacttggactgtatgtgatctcctactatatggagcttctcggttttcagatagaaatttccaatgaggagaatggggtactggcccgcatgtatctgaacagaaaggaacattaaaattcctagggacctccacgaaatcttcatacggacttcatacggttctgctatgataagagcagaaaaagaaaggggagaagatatatgctgttaaccattcacaatcttcaggtacgctacggcagccagctggcacttcagatagactgtcccatctctatccatgagggggagaggatcggtatcattggctccaacggtgcaggaaagacaacgctggtaaaatccattttgggactcaccagctacaaaggaagcatccgcacaactctgaaaccagagcagattgcagcacatatgcagtccaatcattatgcggcaaccatgccggtaaaaactattatggagacaatactggacacaagtatccgaaaaaacagagagctgcaggagctgatatcctattttgaatttgaaaaatgcctgcacaagcgatattcccatctgtccgggggacagaagcagagatttaccatcattatggttatgctccagaatgcccccctcaccttttatgatgaggtgacatccggactggattttgaaaccaggcaaaaactgatggagaagctggtaaattggtaccaggataagtccaataccctgtgcattgtttcccactattacgaggaactggaaatgcttgcagaaaagattcttatcttagaccaggggaaagtgattgattttggagaaaaaagagaattattccggaagtactgcggaagatcggtttttattacagatagcacaaagcgcaaccaggagctcctaagggagtataagaagcttatgtccccggatcatcttttggctatcgcctgtcctgatatagagactgagcacaaaatctctgagcgcctgcttcaggaaaatgtaaactttaagagaagtgataatgacattgagattatgtccaccaatgcaaaggcggcatactatgagagggaggggagatcctatgaagaccaaatcatgcaataagaagcttattatctacgagatacgcaatgcaattggaaatcctttcattgcatttttcggaattgtctttccggtaatgatgctgatgattattacattctccctgagaaaacaggtgccgtcctctatgatacgggagacaaacacaggggttttcattactatgagcctgattattcccatggcggtaatcctcctggggcattccgccaattattcccaggaacttgagaaggagattccggtacggatgcagctgtttggcttttcccagaacagtattatgctggccaagatcattgcgcagaccataactctgacggcaggattgatattttactctgtattctcctatattttggtagatctgcagagtcctaagttctcctccgccctctgcctcataggctgtctgtatcttttaggaatctttttctttctctttgcccatggcctctctaatatttttaaaaagttcggccctacgtatacgataagtatgtttgtctactttgggagcatgattctctgcggtatgatgggcatacagaccgaacagcttcccaaagcgctgaggcgtgtggcatctttccttccaatgagctacatcagcagtgatttcattgaattctggcagggaggcagctataatttcggacctatgattcaggcattccttttctttggcgcactctgcggattgctggtaatatactctaattataaaaacaggagagtgattaaataataaaaccggccggtaagagcttatcatagcttcttataaaagaccagattaaggttacatttcataattcaccattacgaaaatgtaaggtataattcttctttcctatgctataatctaatcaacagaagctgaacgaaaggggatggcagggatgagagtatataaaaactataacaaaaatgtatttctcagaaaggggatggaatacctttgtacaggaattatgacagttctgtgcatcctttggggagtaatccttacagcgctttatcttctcatcctgtttgccgttacctgtgtccggatattcgagccggatgactagggaaatgcccgttctccgggcacttcccggtatattcacagtgacgaaggaaatgtttagactattccaatgatgagttatgacggatccagtattgaaaagccctgacaatatagtccgatgcgcctgggccatattttgtatcagtgacagcttttatatagtcattagaatagacatccacaatcatctcccaatagtttcgcccgagaaaatctgcggttgtgttttcctgggtttgttttacaagttcttgtacaatcgactgtatatcttccgctgagacatctttttgcgtatcagaagtcagacttttatataggtcagtgatttgctgggtgcgcttttttgtttcctcagatacctgttcttccatgagttcagagaaatgatcaagattatatttcatagcctccgtatagttctccacgctgccatactcttgtattgcacgcttggcaatctcagcctccctgtctctggctctctggataaataaatcaaaattctcaagacttccccaattttttatgatatctttcgtattggtggttttaaattgttccaatgcttggatatattctgtcaggtcaaattctttaaactccatacaatgttcccctttctccaggcgggtaaggagctgtatgagtctgtctatacgattccgttttagcaggaacaattctttctgtttcctaaaagcggctatcctgtcaaaatcaggtttttggattatgatacgtatttcttttaatgaaaaccccagttctttaaaaaacagtatctgctgaagcttctgcatagcatcctcgtcgtacagacgatatccggactgtgttaacttacttggctttagcagtccgatttcatcgtagtattgcagggtgcgcttgcttattcctgtgaatgcagcaacttggcttgtggttcgcatatcctatcagctccttcagtttccttagtaattgaatatgaggcagagtgccggcaaacatatattctgcctctataaatctagaatatagtatcacgttacgtgtaagtcaatacattttgcaacaattgaagaaaaatcatgaaggggggaagaggatagcggtaaatattatccgtgctcacttgacaagtactataaattatagtaccataagcagtgttgtatatggtgtaatatatagtagtatatattatagcttgtataaagtgaaaggagactctaattatgaatcaaccaaacaaaaaaatggcactgctgggaagtgtgccaataccgaaggcactgctggcgttggggcttcccaccatgattggtatgctgattaacgcactgtataacctggtggatacctattttgtgggtggtttgggaacggatcagatgggtgcggtcacagtggcctttcctctgggacaaatgatagtaggtctggggctgctatttggaaatggggctgccgcctatctttcaaggctgcttgggcggggggataaggaaacggcggacaaagttgccagcaccgccttgtacagcagtattttggtgggagcaatactcattctttgctctgtcatttttctgagaccgatcttaaaacagctcggagcaatcgagagtgttatgccttatgcaatctcttacgccagtatctatatcacattttcgatttttaacgtatttaatgtcactatgaataatatcgtggcaagtgaaggagcgtctaaaacagccatgtgtgcactgatggcaggtgccctgttaaatgcggtattagacccgatctgcatttatgcgcttcaactgggagtggcaggtgcagccattgccacggctgtttcacagatggtttccacagcagtctacttgtgctatatctttcgaaaaaagagtgtattcagttttcgcatcagggaatgcaactattccagagaaattatgtccgagattttgaaaatagggattcccacactgctatttcaggtattgaccagtctttctatcagtatgatgaatcatgcggcgaaagagtatgggggatctgcgctggcagcgatgggaccgtttactaaaattatgtccatgggaagcctgatcgtatttggatttctgaaaggctttcagccaatcgccgggtttagttatggagcaaaaaggtttgaccgcctgtatgaagcaatcaaaaccgctatcctctggtctaccttattttgtgtggtgttcggcctgactgcagcaatctttcctgcgcaaatcatgagcttgtttacaaaaggagacagggagatggtccgtgtgggggcagccgctttgagagcaaatggtctttcctttatcttctttggcttttacactgtgtactcattcctcttcctggtaatgggaaaggcgaaagaggggtgtatccttggtgcctgccggcagggtatttgttttgtgcccgttattttacttcttccaatggcttgcggcttgcagggagtactgtttgctcagcccattgctgatatactgtcggctgccgtcaccgtatatatggccgtgcatcttcataaggaactgagcgcagcaaaagtacggggaaaagaagcttatccgggagcgggcggctttgcgtaattccggttgctgctagaagctataaagtttgcatacgcagagtgatagtgttataatacttatggagcaatggggcgggtcctgttgctctttttgcacaatggggcttttgtgcaggaagagtgctgaagtaccaagagtttatccccagacacctgtgtctagggataaaaaacggtatttctcgctttgtgtcgtgtttttttattcgaaaagatggtactatgcaaatagaaaggaagaattggcaatggatgcaaagaaaatcggcagatttctaaaggagctccggaaggaaaaagggttaacacaagaacagcttgcagaaatgctctttgtatctggcaggagtgtatcccgctgggagacgggtacgaatatgccggatttaagcattatgattcaaatagcagatttctacgaggtagaaatcaatgacatcttagaaggagaaaggagaagcgagagtatggatcaagagggaaaagagacattatctaaggtcgcagagtacagtaaatcggaaaaagataaggcggtaagagcaggaaatacggcatttggcctgatgtttgcgctatctgcagtcctgattattgtgcagttaattgtcacaaaggaactgtggaccgttgccggggaaacgattaccttacttgtcggaggcatagcatatataggaattatgctgtataatggcatatgggaaaacggttcgggaattcaaagtactccggcaaaggatgctttgacgagcgtcgtgtgctcgggcatattttcttccgcatatgtgttttatatcatccgaataggcggtacggcatcccaggctgtgcgcgccgcagtcatattttttacaggaattgctatattgagttttgcggtcctgagaattttagccttttttaacagcagacgaataagaaaaagagagttaaccgacccgccaaaggaagttaaggaagtagtgccggttaacgttttcacggcagatggaaccatgcaggcagatatgataatagaagcgttgaaaaataatgggattgctgcctataagcaggacatgggagacgccgggttggcctcagtgcgttatggtatggggcggggaatcaatgacagcgttgctattttcgttgcagatgcggaagctgacaacgctgtggaagtaataaacggcatgggactgctttagcggaaaatatttttcctcattcctcagcaatccagtccggattgtaatactgtatccataaaaaatcccccatatgttctatacaaagcagggccagaaaattgagatggacgataaatatctacttgaagttctcacagaaacttcgtataattgaaaaagtatgcataattatacagattgaatcggcactgtaaatatttgagacaggaaacggaatttactaagagcgaaagcagatataagatatgctgctgaaacagagataaacagtataaagaacataaacagctgctggagattcatcaacaaaaataaggagatacaatgagaaaactagctttaagtgatgaaatattactaaaaatcgagaaaccagcccgctatatcggcaatgaggtcaactcggtgatgaaagaaaaagatcaggtggatatccgtttcgccatgtgctttccggacgtgtacgagattggtatgtctcatttgggtatccagatcctttatgatatgtttaaccagagagaggatacctggtgtgagcgcgtctattctccctggccggatctggatcggatcctgcgggagaagaagatccctctttttgccctggaatcccaggatgctgtgaaagactttgacttcctgggtctgacactgcagtatgaaatgtgctacaccaacgttctccagatcctggatctaagccagattcccctgctggcgaaagagagaacggaggatatgcccattgtcatagggggaggcccctgtgcctataatccggagcccctggcggacttttttgatttgttttatatcggtgagggagaaaccgtatactatcagctgcttgatgtctataaagaaaacaaacactccgggggcggcagaaaggaatttttagaaaaagcggcagggattccgggaatctatgtacctggtttttacagtgtggaataccacgaagacggaaccattgcatccttttctcccacctgtgaatgcgcgcctcagaaggtggaaaaacaggtggttatggatgtgacggatacgtattatcccaaagcccctgtggtaccttttattaaagctacacaggacagggtgactctggagatccagagaggctgtatccggggatgtcgtttctgccaggccggaatgctgtaccgtccaacaagagagagaaagctggagtatctgaaacaggcggcaaaggatatgctggtaaataccggacacgaggagatttccctgagttccctaagctccagtgattattctcagctgccggaactgcttcagtttttaattgaagaatttgacaagaaaggcgtcaacatctcgctgccgtccctgcgcatagatgctttttccctggatgttatgagtaaagtccaggatatcagaaagagcagccttacgtttgcaccggaggcaggtacgcagaggcttagagatgtgattaacaaaggcctcaccgaggaggacatcctggaaggagcaggcagtgcctttgaaggaggttggaccagagtaaagctatatttcatgctgggattgcccacggaaacagaagaggatatgagaggaattgccgaactggcagaaaaaatagcccggagatattacgagattccaaaggagcagcgccatggtaagtgtcagattgtagtaagcacttccttttttgtgccaaagccctttactcccttccagtgggcacctatgtttaccaaggaacagtttcttgataaagccaggtttgtaaaagaagccattcgggcccagctgaaccaaaagagcattaagtataactggcatgaggcagatgttacggtactggaaggcattcttgcccggggggatcggaggattggacctgtgatccaaaaggcctatgagaacggaagcctttttgattcctggtcagagtacttcagaccccaggcctggcagcaggcttttgaagagctgggggtagatccggatttttataccatgagggagcgggctgttacagagattctgccctgggattttatagatgtcggtgtgaccaaaaagtttttaattcgggaatggaaccgggcaaaagaggaagagataacgcctaactgcagacagcagtgttccggctgcggtgcgggaagatacaaaggaggtgtctgtcttgaaggttagagtaaaatttgcaaaagagggtcctatgaagtttatcggacatctggatatcatgaggtattttcagaaggctatccgcagagcagggattgacattgctttttcagagggcttcagtccccatatgattatgtcctttgccgcacctttgggggttggcatcacaagcacaggagagtacttcgatatggaagtaaatactgcaacaaactcagaggacatgaaaaaacgcctgaacgccgctatggtggaaggaatgaggattttaagtataaaaaaggtagatgacggtaaggccagtaaagccatgtccctggtggccgcagcagattatctggtaaccttccggcccggtcaggaatcgctgagggatatatttttggagcatttggctgacttttgcggccgggagcagcttctcatctggaaaaaaaccaagaaaagtgaaaaggaaattgatatccggccttttatctatgagatgcgaagagaaggggaaagtatctttttgaaactggcagcaggaagtgcaaataatacaaaacccgaactggttatggaagcttttgccggctatttgtcaatttccgtcccggcgtatgcctttgaagtccatcgaatggaaacctacggggagattcaggcagagggcagaccggtattcgtatcgctggaaggactgggagaagaaattgagtaagctaattattacaaagatgcagatacattcccaagaaaggacggtaaccgcacttgtggaggagggaaaggtgctggaactgcggctctcttctttggaacaggaagcgctgcttggcagcatttatattggaaaggtaaagaatgtatctcccaatcttgacgcggcttttgtggagctttccccgggtgtgacaggttatctgcccctgtcaaaagaacttccttactttacaaatccgaaaaaagacaatatagtaaaagcgggtgatgaagttctggtgcaggtaaaccgggagcccttaaaatccaaggcttataacctgacatccaatcttagctttaccggcaaatatctggtactcaccagccagcggtgccagctcagcctctcctctaagctgaatggggaagaccgggagcgcctgaggaagtggctggtgccttgtatggagacggaattcggtctgattgtccgcacaaacagcaaagaggcggaaaaacaggagatactggcagaactggaatacctgaaaaagcgttggaggcgggtaattgacatctgtaaaggcaggacctgctacagcctgctggaaaaagccagccccttttatattcaggctgtgcgggatgtctacgggggtaccctggaggagattgtcacagatattccgtctatatttacggaactccgggagtatctggcggagtatcagaaggaagacacagaaaagctcaggctctatgaagacaggctgctatctcttcacaagctttattctctggagcgcgcattggatcacgcggcgaaagaaaaagtatggcttccaagcggaggttttttaatgatccagcagacagaagcttttgtggcagtggatgtaaataccggaaaatatacaggtaagaaaaagcagcaggaaacttaccgtaaaatcaatcttgaagcggcccgtgagattgcggcacagctgcggctgaggaatctctcaggcattattctgattgattttattaatctggagcgaaaggaacaccaggaagagctgctgaatgttttcaaaaaatatctccgcagagacccggttcacacggtacttgtggatatgaccaagcttaacatcgttgaagtaaccagaaagaaagtaagaaaatcactggcggaagaaataggagggaaataatatgctgaaatttgcacattttaattttaatgtactgcacctggaaaagagcctttccttttataaggaagctctggggcttacgcctgtcagaacaaaagaggcggaggatggttcctttactctggtttatctgggagatcagaccactgattttacgctggagcttacctggctgaaggatcggacagaggcgtacaatctgggagaatgtgaattccatcttgcctttgagacagacgattatgaaggcttccataagaaacaccaagagatgggatgcattgtgtttgaaaatgaggctatgggaatctactttatcacagatccggacggctactggatcgagatcgtaccgtcaaaataggaaaattgtgtatgaataaaagaaaattaaaaccgtatcacggtctgttgttttttgcagtggtgatgttctccttttactttattatggctcccctgcagatgcgctttggtatgtacgggcttgcaatgactgaactgctccttctggtaatggccattgcctgcgcaaaattgtgccgggctgatcttaaagaaatatttcctgtaggcagagtcaggctttccaagacggcgggaaccatacttctctggctggcttcttttctcacagttatggtgctcacattaatcattacatggtttttccccgatgagatgctgggggtaagcgaagggttgagctccgtgatcagctccgtaccgtttgctgttggatttctgtttacggtagtgatgcctgccgtgtgcgaagaagcagtgcaccggggagtcattctccacagtatgcttccgctgaagaagaagtggctcattgtactaattatgggaattctgttcggcatctttcatacgagtatatggagattcgtcccaactgcacttctgggagccgccttgtcctacgtcatgctggagacggaaaatatggtatatcccgccatctttcacggggtaaataactacgtaccactggccatatcctcctattctgccaaaatactggaacgagcggggagtgacctgtctcagaccagtctggatgctgttccggtggcaagcatcggcatctatctgctcatggcctgctgtgtgccttttgctgcttacgggggaaattatctgctccactatggggaggaaggatacaggagcacctttttccctaaaaaaagacagggattgattattactgtgctgattataacaaccgttctgattttggcggcaggatttgcacttttactctacggaattttaattgattctcagtttcatgatctgctaaggcagaatatgtaaactgctggaaatttgcaggaaaaaacagttgacggacacaatatcttgtgctattataatacggatgccgcacaaagaggtcagaagtgttgctttctgagtgattcagcaggaaggcagccaccatatttggcgagtaatgataataggaggtgccatatgtacgcaattattgcaacaggtggtaaacagtacaaagtagccgaaggcgatatcattagagtagaaaagcttggtgtagaagctggagagactgttacatttgatgatgtacttgcagtaaacaacgacgggttaaaggttggcgcagatgttgctgatgccagtgttaccgcatctgtagttgagaacggtaaagcgaaaaaagttatcgtttacaagtataagagaaaatctggttatcacaaaaagaacggtcacagacagcagttcacaaaagtgaaaatcgaaaaaattaatgcttaattcctgacaggcgattatgattacggttattgtatatcaaaggtcagacggtgagtatataggatttgaaaccagtggacatgcagattacgccgatgagggatatgatattatctgtgcggcagtttcagcccttactgtgaacgctgtgaattctgtcgaaacctttacggaggatgaattcgggggagagcagagggatgggtacttaaaatgtatgattactggtcctgtcagtactacaacagcattactattaaaatcaatggttcttggattagagatgattcaggaaaactacggcaaagaatacattcatttgatattcaaggaggtgtaaggacatgttaaagatgaaccttcaaattttcgctcataaaaaaggagttggttctaccaagaacggcagagattccgaatctaagcgtttaggtgcgaaaagagctgacggccaattcgttaaagctggcaatattctttacagacagcgcggaactaagattcacccaggtgtgaatgtgggacgcggaggagacgatacattatttgcattagtggatggtgttgttcgttttgaaagaaaaggaagagataagaaacaagtttctatcgttcctgtatcagcagaataataagtcacgtataacatggaaccatgcaatcatctaatgtgttgcatggtttttatgttattgatcatacttataatatgcagtactaagattatgcttgaaatagaagaaagaaaaaaacaggtgaattatgtttgcagacagagctaaaatatatatcaggtccggaaaaggcggggacggccatgtaagctttcgaagagagctttatgtacccaacggagggccggacggaggagacggaggaaagggcggagatgttatctttgaagttgacgaaggcctgaataccttaggagactaccgtcacaaaaggaaatatgctgcccaggacggcgagcagggaggcaagagaaggtgccacggaggcaacggacaggatattgtgctgaaggttccggaaggtacagtaataaaggaagcacagagcggaaaagtaattgcggacatgtcaggggataactgccggcaggtagtattaagaggcggcagaggcggcaaaggaaatcagcattatgccacggctactatgcaggtgccaaaatatgcccagcccggacaggctgcccaggaactggacgtaattctggaattgaaggtaattgcagatgtaggactggtgggattcccaaatgtggggaagtctacctttctctccagagtgaccaatgcccgtcccaagattgccaattatcactttactaccctgaatcccaatctgggggtagtggatctggaaggcacggacggtttcgtcattgcagatatccccggattaatagaaggtgcctctgagggcctggggctgggacaccagtttctccgccatatagagcgtaccagggtcattattcacatggtagacgcagcatctacggagggaagagatcccattgaggatatttacaaaatcaacaaggagctggaagcttacaatccggagattgcaaaacgtccccaggtaatcgctgccaataaaattgatgcggtgtttcaggagggggaagatcccgtagaggctatcagaaaagaatttgaacccaaaggtgtccgtgtatttgcgatctcggcagtaagcggacagggtgtgaaggaactgctctattatgtgaaggagctgctggatcatacagagcttgcgccaattgtgtttgaacaggagttcttccctgaggatgttctgatcacggagaaccttccctacactgtagtgaagagtgaggaagatccccatatctttattgtagaaggacctaagattgaaaagatgctgggatatacgaatcttgactctgagaaagggtttgccttcttccagaagttcctcaaagaaggagggatactggcagatttagagaaagccgggatcgaagagggagataccgtacgtatgtacggatttgattttgattattataagtaggaggatttatgacaagtaaacagagagcgtatttaaaagggctggccatgaatgtggatcctattcttcagatcggcaagtccagcctgacgccggaaaatacaaaatccgtcgcggaagcactggaggcaagagaattgattaaaatttctgtgcttcagaactgtatggatgatccaaaggccatggcccagattcttgcggagagaacaggatctcaggtggttcaggtgattggaaagaagattgtgctgtataaggaaggaaaaaaagataagaaaaaaatagaacttcccaaataaaaacaggcagatacagcaccttacgaggaagactatcatgaatcagaaaaagaaacgaatcggaatcatgggcggaacctttgatcctatacacataggccatctcatacttggtgaaacggcctatgagcagtttcagctggataaggtatggtttatgccggcagggaatccccctcacaagcaaaaccgccagggcagggctacggacagtgagagagtagatatggtacgtctggctatcgcctccaaccctcattttgagctctctctgatagaaatgaacgaggatggatattcgtatacctaccggacattagagcgcctgaaaaatcagtatccggaaactgcgttttatttcattctgggggcagattccctctttgattttgacaaatggcgggagcctaaaagaatctgtgacgcctgtactgtggtagttgccacaagaaaccataccagccatcagaaactggatgagatcatgtggaaactgacctataagtttcagggcagctttgtaaagctggattctatcaatatagatgtatcatcaaaaatgctccgctcctgggtaaaggacggcagaactacgaagtattatctcacagataatgtgatggactatatcagagaacacaagatttataaggacagtgaagaggtatgaactacaacatcgaaaaaatgaccaaggtcttaaaaaaagatttggatgaggagcgcttccggcatactatgggggtgatgtacaccagtgcaggtctggccatggcccatggagaaaatctccagaaggcacagaccgccggtcttcttcatgactgtgccaaatgcataccaaacaaaaagaagctgagactttgcaaaaagcatggaataaaaataaattcctttgagatgcgaaatccctttctcctccacgccaagctgggcgcatttttagccaaagaaaaataccagataaaagacagcggtattctttcggccatcaggtaccataccacaggaaagccggatatgaatacactggagaaaattgtttatattgcagactacattgaacctatgcgctgcaaggcccagcacctcagtcagatacgcatgcttgcttttagagacctggatgagtgtatgtatgagatactaaaggatacactagcttacctggaaggcaattccggagagattgatacagctaccaaagaggctttttactactacgagagattacacaatgaacgacatagagaggaaacggcaaatgaatcaaagtaaagaaatggcacgacttgcctgcgatgccctggaggataaaaaggcaatcgatattaaggtaattgatattgaaaagattaccactctggcagattactttatcatcaccagcggttccaaccgcagccaggtacaggcaatggccgacaacgtggaagaattcctgggaaaagcaggatatgaaccgaaacaaatagagggataccagaacgcaaattggattttgatggattatggggatattgtgcttcatattttcgatgaagagaacaggcttttctatgatctggaaagaatctggagagacgggacttgtatctctgtgagtgaattagaatagaaatttggtgcggcaatgtgagctgggggcttgctttgccgtgtttttttgcaataattgggatttaacttcctaagcttgagactgcccagtcggaaggtatggggtggcatggggacggtgagagaaagttccaggtgtagatttatcagaaggggaatgatatcctccatataggatacggctgtaaaattgtcagatagaatatagatgtaatattgccaaagagaatggaattaataattgaaacgggttaagttgtttatccaaaacattgagttaccaatagtgctaaaccagaggaaaagtgtacaactttcgaccttccccacccgttttccgtgaatgtgaagtgagtcactgccaggtcaagggaggaggtcttggggccaagggtgctgggtggatctgcgcagactacggagtgcgtccgaagatccactgccggcggtcacttaggagcgaaggctttcccgagcttcttagtgaacggccaggcagttagctaaggagaaacgcagtagcaagcagatccacccagcacccttggccccaagatctcctcccttgaccgtccgtctgcaacgctccgctcgccgactatataaccccgaacttcacatacacaaaactatcactctgcacttatagtatccaccaccgacatcccccggattctctttgcaggcccatgcacagccaggatcgcagatcctgcgatcaccagtatgataaccagcagagatccaaccggtacataccaggaatctccccaccgataggtgacaagtctctcaaacagaagcttgttgagaggaagacctatgagacagccaaagaaaataccgaaaaaagcgtaggttgctgcctcagctgatatcattcgtatcagctgccggtcactcatgccgatggctcgcattgcaccatactgacggaggcgggcggatacactcatggcgatgctgttaatgatatagaatacagagattaaggcaattacagccagaaatccgtagatgaacagtgcaaaggaataataagcgcccatggtctctctgtttttcatacgctgatctgagaagataaccgaatctccggcatcggcacgcatctgtgctacatccttgtctgttactttggaattgaactgtacatctatgatggtataattgctctcccccgttaactgctgaaataatttttgggaacaaattacagtttctactcctggctctatgctgaaggggccgttggacagaattcccgacacctttacattcaccggctgtccctcaggctgagaatctatggtaatcgtactgcccaggtgcaggggattttctgtgtgaaaaacagtgagtactgtgctgccattctttgcatcatcgattgatccctcaaggagcatatcatctgcccactggaactgatatttttcgtaggagataaggttgacattttttgtctgtccgtttatctttaccgggatattgtaggcaaagcttctgccgtacaccttttttacagagggaatggccccataggattcagcgagatccggagagattgcgcaggtattgtcaggactgatcacagacagatccggtgcatagggcttcagcggtgtgatggcatggttcataaaatctacggctgaacgaaaggagagaaatagaataatgctgaaggcaaatgagccaatcataaggaaaaaattcttcctgctcccttttgcgtggtggatccccaaagcagtatctacctgaaagaatgcggttgatgccgctttccgcgcctcctggatggtccctgcatttcccgatacggccgccacaggggaaactctggatgcttttttggctggcgaaccggccgcaagcaggacagtgataaggccaatcagaacacctgatatcaggcccagccagctaatcccgaaatctggcatctccccaaatatgcttggacttaagaactccagcagtgcgcacagaagccatatgacagcagtaccagcagcaatccccagtgggatagccgttttacaccaactaagggcttcccttcgcacaaagcgaattacttgcttctgagttgcacccagacagcgcatcatgccgaagaattcggttctctgtacaacattgctgttcaggcttcctgcaatcatgagagttcctgcaatagcaaccaggacagccaggactcctgcagtaagatatagctgcatcatatagggatctttgctctgcagcatcagtgccaggagctttgtattctgtgtgatttgattgtctgacagctgcagctttgcctgaatatcagacagtgtcttttgtatgctgcaatagggagtgaatgtaacataaaagatcccctcataggtttctgaagaatcagcagacagctgtgtccggaaagcttctgtatttagaaatacaccgaaggcatctttttcagtgagcatagacgtatctcctgtaaatccgcataccgttaattctacggattccccttggggaacggtcagtaaaatggtatcgcctttttttagccccagctgttcttttacactttttgtaaaaacagctgaatgtgtatcttttggaaattccccttcctccagctccattcccggaaacatatcaagcaattcttcatcgaacccgcagataaccgcatcattcccctgaagctgatacccctcatctaaacgataattgagaacatcataccatgcagacgcttttatctcaggccgggaggctatgatagcagcctgttcagcagtgatttctttaaaacctgcgtgccagccgccatcgctcttttgagactgcagcctctgagcacgcatctccatgtctgccatgccgaagattacggtaacaagaaatactgccagtataatgcagattctggtcattctgctttgtttgcggtgtaccttagcggaaataggaattaagtccagataatgtttcataccttcatgccccccagttcactgagaataccgtctgtgacacgcagaacacggtcaacagaggatgtaagattgatattatgagtaatcataagaaccgtctgctgataatacctggatgctttacagagaagatccatgacgtcctggctgtttttggaatccagattcccggtaggttcatcagccagtaccagcatgggcttcgcaatcagagcacgtcctatggctacgcgctgctgttgtccccctgacagctgactgggaagatgggtacggcgatctgtcagacctagtacctccaggatctcgtctgtctgttcccggtttggctttttattgtccaatagaaggggaaatataatattctgttccacattcagctccgagatgaggtgaaaggactggaagataaatccaatgtggcggcggcggaacaccgtacgttttgtttccttcattgaaaataaatcttccccattgagataaatatggccggacgtaggagtgtccagacctccgatgcagttcagaagagtactctttccggagccggactcccctactacagcggtaaattctcccttttccacagtaaaggaaacgtcctgcagcgctttgacctgtgtatcaccttttccatatactttgcagagattttgagtacgcaatatttccatgtatttattcctccttgttattctaccctgacagtatatcaggagaaccttacatacagatgaattccagcttacggttctgtaaggaaagaaataataaagacggttcccttgcccggcgtgctatgaagagaaaggatccccccctggccttcaataatcgatttggccaggggcagccccaagcctaccccctgtgtatcggaggaggatttactgcggtagaatcgtttaaagacatggtgaatgtcttccggaggaatcccgctgccgttatccgtaacagacagccgaagcattgccggagactgctcccagacgatcttaattgtgccccctgtcccggtgtggtccagagcgtttttcaccaggttgcctatggcctcaccggtccattccgggtcacacagaatctgctccctgggattaccgtttatcaggatctgtttttcttcctgctttgctcttgtaatcaattctgcaattcccccggaaaccagttcataaaccgtacagagttttttctcaaaacgaatatttcccgcatccagccgcataaccttcagcagagagaggatgagctgttccatacgcgcgagggatatcagagattttctggaaaattcctctactaaagagggattttccggctcatccaagatgatttcagcatacatattcagggcagccaggggagtctttaattgatgagagatatcagatatcatatcttttaagaattcctttgctttctgttcggattcacttttggactgcaatgccatagccagctcattcacggaggcaaacaactgatacagtgtacctgtttcattcctgggcagatgatgtacgaagctcccctccgcaaattctgcaattctgcgggcagctttttgatacagcagttcccgccggtaaagaaagaaggcggagacgcccatcaggctccctcccaaccccagccctcccagaagagcgatgatcagatatcgtattgctgaccggcgggctgcgggaagaagccagaagggggtactttcggtacgtccgcttttttcaagaagcagtacaccttcctccgtagacttgctgtttttaaaagcagcagcggtaatatcttcagatacgccctgatctaatagataggaagcggcagtctgttcctgtctgagcagaagctttttcacctcacgagtctgtataccagcacataaaacaaaaaaggcaagcatcagtgtgcagaagcaggcgagaaataagaaatagcagcgggattgcttttcatgcagaaagctcatagcgttactccttccattgatatccgaacccccggacagtcagaagatgttcagggtgtgagggatcgttttccagtttttcacgcagacggcgcacatatacagacaaggtattgtcgtccacaaagcttccgttgccgtcccacaaaagatccaggatagcgcttcgggtcagaattcggccgctgtttcttaccaaaagacataaaagccggtattcagcactggtcaattccaggggacttccggacaggaaagccttgctttgaagaagatcaatcgacactttaccagagacgagctggccgtcccctagttcccccttcctcccgctgcgcctgagaagggcccggatacgggagcacagttctcccagacggaagggtttggtaatataatcatctcctccgctgtccagtccccgtatcacagaggtctcctcatctgcagcagtgaggtatatgatagggatggggttcccctcccggcgtacctgttcacagatttcgaatcccgttccatctggaagagtcacgtcaagaagaagcaggtcatagtcgctgggaacagataaaagtgcttttgcctcccggagcgtccggacaacatccagttgaaacccattttttttcaaggcatactgcaagccatcgatcagactgatatcatcttctaaaagaagcagcttatacataagtttcctcctgtaaaaacatgtttatagtgtattataacataaatttataggataacccttcagcttacaaatatgtaagatgaactggccctatagtcagttttcccaagtcccatcctttttcttgacaatatttgtaatatataatactataatttatagttgtttatgacgacggaaaagatactataataatcatttatttataacaaggcaagatagaaaggatggtgttatggcagctattgatttgattgtattgggaatggtgaaaaaagagcctttaagtgcctatgatattcaaaaattagtggaataccgcaatatatcccgatgggtaaagattagtacgccttccatttataaaaaagtgattcagctggagaaaaaagggtacattgaaagtgagctggttaaagaggggaatatggcggaaaaagctgtatactcattaacagaagaaggcgaaaaagaatttgaaaaattaatgctggagatttccgagcagccgattcgcatattcctggatttcaatgctgttatagttaatctagacagtctttcccctgaaaaccagcaggagtgtctgcgtaagattgaagaaaatgtaatgctattgaaatcatacctggaagataacattcataccaaagaacaaatgcccgagattccagagacagggaaggcggttttgcagcagcagtatcaattggcccagtccatggaaacctgggttcattcaataaaagcaggcctcgaaaaatagcagctgaataagaaattttacatctgcatattttaatggtatactttactatatggtgaacactgtaggtcctttctgaggatatgcagcagcactgtaagcaaaagaagagcaggagaaagaggtaggcaaatgttaagtatacttatgcaggtattagtaggtttgattgcaggctatatcgcttcccgtattatgaagcttaagggaggcgttgtaaagtatatcgcaatcggtattgtgggatctattctagggaatattctgatttctttaattggcttttatgccattggatttttcgcaaagataattgtatccatcgcaggagcctgtctgctgatttctatcagcaggaaagttttataatcaagtgcgtaaagtcaagccaccggggtaccggtggcttttgtacctccccagaagaccgctgtatgtaaaaatatattacctcatagtttttctaatgaagagagaatgctattttttaactgcagcagttcatccagattctcttttttgagggcggattttaccgtaatgacaggttccaggatctctatctcttttaattcccccaggagtgaacgcatttgtctggcagaggccggggcccaggaaccattttccacaagagctatggtacggttttgcagattcaaagccttcatatcatgcagcaaattcagcattgccgggtagattcctccgttataagtaggagcggcaagaaccaggtgactgcagcggaacacttctgcaatcagagtggagatatgggtattggaaatatcatagacagcaatatttttgacgcctgcttccgccagactggaggcaaggatatttacagcattttcagtatctccgtacatagaaccataaagcagagcaacagcatgttcttctggttcataccggctccaaagactgtatttgtccagaaaataattaagattagtgcgccacacaggaccgtgcaggggacatatcatgcgtagttccatatctgtcaattttttcagggctgtctgtacctgcgttccatatttccccacaatattcccgtaataccgtctggcatccggcagccagtcacgggcgaaatccacttcatcattgaacaaatttccattcagggctccaaaacttccaaacgcatctgcggagaataggagcttttctgtttgttcgtatgtcatcataacctctggccaatgaaccattggagcaaaacaaaacttaagtgtatgtgcacccagggggagggtagtcccttctttgactacaagggtccttccatccagctctatctcatagaactgccggatgaaagcaaaggttttagcattgcccaccagtttcatttcaggaaagcgcagcagcaattcttcaattcctgcgcagtggtctggttccatatggttgactaccagataatccagggagcgtcccctaagaacataactgatattttccaggaactggcgggtaatagaggaatcaacagtatcgatgagtgctgttttttcatccaaaatcaaatatgaattataggtaataccccgggagatgggaaataaattttcaaataaagccagtcttcggtcatatccgcctacccaggtgaccgcatccgtgatttttcgggtacaatacatggttttaacccctttctagagacatattaaaaaaatatatgattagttgtatctaaccaacatatagaatacactttttttcataaaatagcaagaagtctttttgttatgaggctgtcaattgctttacaaaattttgtagttgctttttgaacaggtacgtattataatacaacaggttagttaagactaacgcatttcgatattatgaagaaccgactagaaaggatggatatacggatgcatacacttttgattgagcaggtaaccgggcgtgagattatagattccaggggaaatcctacgatagaggcagaagttctgctgacggatggtacaatgggcagaggagctgcccccagcggagcgtccacgggagagttcgaagcgctggaactgagagacggagacaaaaaacgcttcggcggaaaaggagtttctaaagcagcagaaaatattaatacagttatacgggaagcgataagaggaatggatgctgttgacctttatgcagtggatcaggcaatgatttctgccgatggaacaaaagataaatcaaatcttggtgctaacgcgattctggcggtgtctgtggcctgcgcaagggcggcatcccaggcactgcatattcctcttcatcagtattttggaggaattaacggaaacaggctgccggtacctatgatgaacattctaaatggcggcgcccatgccacgaatacggtggatgtacaggaatttatgattatgcctgtgggtgccggcaccttcagagagggtttgcgatggtgcacagaggtattccatgcattggcagagattttgaaatccaaaggccttaccacctctgtaggagatgaaggaggctttgcaccagatttggcaagtgacgaagaagcaatccattacatactgggtgcgatcaaggcagcgggatatgaatctggaaaagattttgtgctggggatagatactgcttccagcgagtggaagagcggcttaaaaggagaatatcttctgccaaaaagcggcaaacggtttacctctgaagaattggtggaacattggagtgctctgtgtgaaaaatatcccatttattccattgaagacggcctggatgaggaagactgggaaggctggcagctgatgacaagaaaactgggagaaaaagtgcagttggttggagatgatctctttgtgaccaacacagaacgtctggagaaaggaatccgactgggctgtgggaattctattttgatcaaattaaatcagataggaacggtgtcagaaaccttggatgctattaaaatggcacataaagccggatatactgcaattgcctcccatcgttcgggggaaacggaagatactacgattgcagatcttgcggtggcactgaacacctgtcagatcaaaaccggagcgccaagcagaagcgaacgggtggccaaatataatcagctgctccggatcgaggaggcattgggaaggaacggagtgtatccgggcatgaacgcattcggatttactcgcatatagatcaaataataccgggcttttcattcctgaacataaaggaatgaaaagcccggtattttaattcgtggtcaacgttatcttaaaaaacggaacacgccaattaccttccccataatctggagatcaccatcaactattatcggatccatgtaatcgttctctggctgaagacggtaatgaccattttctttataaaaggttttcactgtggcagagtcttctatcaaagccacgaccatatccccattctgtgccgtggactgttttgagaccaggacataatccccgttcagaattcctgcattcaccatactttccccatcaacatgaagtaagaaagtgtccgtgttgggcatatattccgaagggataggaaaatagttctctacattctccacagccagaatcggctgaccggcagctactttacctacaataggaacattcacaacctcgcgtctcacaagattaaaagaatcgtcaataatctcgatagcacggggttttgtggggtctcttcgtatgtagccattcttctccagtgtctccagatgggagtggacagaagaagtggattttagatgaactgcctcacagatttcgcggacagcggggggaaaccctctgtttaatatttcgctttttatgtattctaaaatttcggactgctttttgctgattttgccgtatgccataaccaaacctccaggaatttttcttattcattaataccgcacagatggtaatttatttcttatttatcatatcacaaaggagaagagaatgcaaacaaatattcggaatatctgttcggatttcgacaaaaaccattgacaaacgcatgttcggattgtataatcaaaagcataaataagaacaaatgtttgcgaacatattttcgggaggcgtagatatgaatagaaaagtaaagacgttttttgtggtattggcattgattcttgtatccggcggcatcttttccggaaagtttgctttgaccgccaacgcgggaacagaggctggagagcggtataagtattataccagcattgagatcgaaaaaggtgacagtctctggagcatagccgaggaatatatgacagaagaatatgattcaaaggatgagtatatcaatgaagttatgaatataaatcatttggcaacagataagatttttgaaggaaattatctgtgtatcccgtattattccacagaggtaaagtaaggtgtcttagggattgggtactgatttcgtcagtacccaatttgccgtcatggagagattttcacaatgtatctccttacaagtaattttgcagctgtcaggggtaaggacgttacctgaagtaaaaaagaaatttccgtataattgttcttgaaatcgctggaaaggtaggttatactgagagtgtcaatctattcgccaaacacgagtttttcgaatagatatagatgcattagtatacataatactattattgtaaacctaacataaattttggctgcattcactatatgttttctcaaggaggtatttcatattgaaacaggaaaaaatgacttacagagaattgacggatacagaaaatattttaaaactcagagaagtccttcatacattgcctgactttacccgggatttctttcgttctatcagtacaaccacaacaactaaaacaagaatctcgtatgcttacgatattcgaatattttttcagtttctactggacgaaaaccctgctttcaaaaatatgaaaatgacagaatttcaactgcaggtattagatcaagtcaaagccattgatattgaagaatatttggagtacttaaaggcataccgggatcatgataatatggaccagattgttactaatggtgaacgggggctgaaaagaaaaatatctgctttgagaagcttttacgcttattattacaaaatggaaatgattcatacaaatcctactgttttagtagatattccaaaaatacatgataaaacaattacccgcctggacgcagacgaggtggcgcttctgcttgattatatcgagcatgcaggggatacgctttccggacagaaaaaagcatattatgaaaaaaccaaaaccagagacctggctttggtgacacttttacttggaacaggaatccgggtatcagaatgtgtcggactggatatagaggatgtggattttaaaaacaatggtatcaaagtagtacgtaaaggcggaaatgaaatgattatatactttgggcctgaagtcgagaaagcattaaaatcctatcttgaggagagatcacatattacccctcttcccgggcatgaacacgcactcttctattctactcaaaaaaagcgtatgggggtaaaggcagttgaaaatctggtgaaaaagtatgcacagcaagttaccaccaccaagcatataacccctcataagcttagaagtacttacggaactgctctttaccaggaaaccggcgatatttatttggttgccgatgtacttggacataaagatgtgaataccacaaagaagcattatgcggcaatggatgatgcaaggcggagaaaagcggctacagctgttaaattgagagaaagctagctcatattagtttaaaagcggccaaagtgcctcatttccatagaatgaagcgtttggccgcatctgcgtttctttaaaaatactctttgctaaggacatcaatctcctctgtcactgcctcatatacccctggatacgtacttcccggtcctcccatggtcagacagggaatgagatatctggtgcctgcagccgcaaagagctctttaagcccattgcggattttctcccgggaccagtcctccatgtcgtatttaccattgtccaggccggccataactgtaatccgtcccccgcatttcttcaatatttccggaatattattttcatataccggtccctggattacatcaatgcccattcggatcatactgggtattagattggctatataagagtcagagtgatgaacaatgatttctaccccattttccttccaaaagccataaatcctcttgtaggccggctctatgaactcctcaaacatttctggcgacagaaaggaggttctctggcttccccagtcatcgtgatggaaaagagcgtccggatgaaggtgggatacaatctcctctgcggccgctatctcccagtcagcgataaagccgatgagtgcatgcatctcctccggttcctcatagaagttgatcatagtgtcttccatacccatgaaatagtgaagcttctccagcactccgttgtatacactggccgtgacaaaatattccctgcggtctatccgggccgcggcctctatataagggagccattgttcctctgtaaacttggtagggcagggtttaattatctcccgccattttgtaatgtccttcaggagcttatcttccccctcacagaggggaaactgtccgggtgtattctttggataagtaactttcacaccccagccgttagtacccgtctctcccggctggagatcacatccggcgtaaacgccgatgggatcccggacaagccccagataactatattgattaacaaagcgatccgggctgccgccgcgtatggtttctctggcattttctttaattgtcagcattttattctcctgctatctatgattctatattttataaacatcttacgcttttacactcccatttgactctttcacataccggtaaatcttagagacgatcacacacacagagaacacgattcccaaataagaaacagccttcattacaatgttcatcaacactccgaaggttccgaagttagagaatacaaaagcgccgatacataccactgccaccacaagcttataccacttgctgtcctcccgctgaatgttagaggatgccacccatgccatgcctgtagctgtggtgtaagtggcaagcaccacgataataccgtagaatgcataaaacacaccgcccagacgctgtcccagaatcaaaaggggaatatccgtaccgcctacaacggaagcgtttagcacaaacgcaagaaatacaaaggtctggcacaaaactgtggcaaactgtcccaggacatttccccataccagttccttttggtgatctgctcttgttgacacgttggcgctgtaagcactcatgttcaataccacataggtaaaattcagcactgcgctgaaaataaggcttccagacatgctgagtccgcttttttcccgtatcagtatatcgccagtgctgaagctgtctgtaggattgatgtagctgtaaacacagatcaccaccactgccaacaggatgatcggggcaatatttcccagaatagccgtcagttttttcataccaagcagggcggtggccataacggcaatcagcatgattactgtaccaattcgtgtatccagtccaaatgcctggttcatggaggatgcaccgcctgcgatcatactgcccaccatcaagaagaatgtcagcgtattaaaccaattaatggcaagtcccagatattttccgcaataatggcgatacatcatatccatgctggccagtttgtacttgcggcaatccctggaaacgactgcgatgcacaacagaatcagcagcgcggaaataatgatccctacagccccgggaagtccatggggtgcccagaactgcagcacctctgaaccagtggcaaaaccagctccgataccaaaggacacataggaacccgccagaattaacagcgtcttcatcgaaaagcttttctcattactcattctctttcaccttctctttcattataaataatgtctgttccgttaaagtccccccagttatgtcctattttacagattcagagctgtatcataggcctgccttaccgcggtgcggatcagtccgggctcatagcaatctccgatccaggcgaagtcaatgatcgtatcccgcagagtctccacagtctcctcattgggtgcaattcccgttgccgcaatgactgtatctgccttcagtgtaatttgatttccgtctttatcctgacagatcataccttcatccgtaatctccatgcatcttgtgttcaatctgacttccacatgattcttctcaatattcgtccacaatgcatccatctgcatggcgcctgtgcccggatacggggtgttgggaccggaagccagggcgccagacatctctacgatagtagcctttttcccggccagggcaagtccaatggcgcactctgctccggcaaagcctccaccgagcacaagaacattctctcctacctccggctctctgtcgtaaaagtctacgatctgaattgctttttcaatgcctttgatgggtggaataatggggtgtccgccaactgccgcgatcaccacatccggcataagctcctccaccagttcaggcgtcacttctgtattcagccgcacctcaatggctttccttgccaccgtgcgctccagatactcccggtaactctgaatccgttttttaaaggattctttttcaataatccgcataaggcctcccaggaagccctttttttcacagaggattacctcatggccacgatctgcagctatgatggccgcctccatcccagccggtccgccgcctgcgatcaatactttctttttttctgtaggcagaggcataaacttatagtcgctatcccgtccgatctggggatttacagaacagtgcagaggcagattataataccctccggtgagacaggcaatgcagcgcagacagggacgtatctcatccacttttccgtgcatggcctttttcggaagatccggatctgcgatcagagccctggccagcacgacatagtcaaccataccgtctttgatccatttttccataacggcaggctccgtaatggctcctactgttcccacgggaatatgtaaatggttcttgatttctgcagcagcccgtatattgtgaccctcatctacatcaaaccagcttggagtagacaaaacggtagaatcatgaaaatgcagggatccgcaggacacctggatcatatctgcaccatgctcctccagcattttacagtactcaatgctttcctccagctgatatccctctgtcatgccttctttccaggagattcttgcctctatcaggaaatttggaccgcagtattcccggatcttgtcaatgaccatcatggttatacgggcccggttttccaggcttccgccaaattcatctgtccggtgattcagtaccggagataaaaactgggacaaaagccatccatgacctgcgtgcaccagcacggaatcaaaaccgcagtgttttgcccgtagggccgctttaccatagctgtctaccacctcttcaataacattttggggcatttctataatctgatgtctgtggatgccattgccatccccctggtcaaactcatcaatcatgtcgctgggaccatagttaatgcgattatcgtcatggaaatgcattcccgcatggagcagctccatggatgcatgggctccctgggagcggatggcccctgcaatgtcataaaacccggcctcacttctcacatcataggcctttaccttgtagctccagtccacgcatcccgtctcatgtaccaccacatcccccagacacaccatagcagcccctccctgggcacggcgctttaagaagtccacgttcttcacattgttgtggttcaggtccgtcaattccttcatacctgtaggggaaccgaagattctgtttttgaaggtggtctttttcaccttcatgggactaaatagatttgggaaatacttattcattactttgccctccttttatgatgtttttttatattgttttctttttaaaaccctctttttctgtatgcttctctcaactgacccaagccctgtgccagaaggctcctggcacagccaatattcatccgcataaaaccgcttcctcccctgccgaaccatctccctgcatccagggccagacctgcctcccgcagccagaaatgctccagtgcatcatcattcagatgaagttttctgcagtccagccacagcagatacgtggcatccggcttctggcatgtgattttcggcatccatttacccagatacctgtctacaaagagataattctcccacagataagcgagaagctgctctaaatattcctcacactccgggtcagaataggctacatcaaaggcagttacgccaaaggcattgggtatatttacccttcggtccatctccttcacaaaagcttcccgcagcgcctcatcaggtatcaaaatagcggaaatctgcaaacctgcaatgttgaacgttttggacggggccatggcagtcacgctgatacgctcatattcctttcccaaaccggccagagaatagaaacgtttgtgctggtaagtaagatcagagtggatctcatcaatggccacaatcacctcattatgtatgcagatatctccgatacgcttcagttcttccctgtccagaacccgggaaacggggtttaacggatgacataaaagcaacagcttatttccaggatcagcggccagctgttccagctcctcaaaattaattccccatttttccccgtcaaagacaagaggattttctaccagctttctgccattgttcaccacactgtcctggaagggataatatacgggaggctgcacgatgaccccttctccgggccgagtaaaagctgccaccatagcacttaaggccggtacaatgccattactgaaggtcacccactccggcttcgccttccatccatttctcttctcctgccacctggccgccagtccctgagccttgacggatatgtcgctgtaaccgtagataggatgggctgcccgcttgcagacggcctccgcaatcggacggggacagggaaagtctgtgtctgccacccagaaaggcagcgcctgagggtttccaggaaattcttcttccatcccgtcccatttatgactcaatgtaccatgcctgtctaaaactttgtcaaaatcatatttcatatgagaacacctcctttatgttatatgccatttatctttaatattatttattgttaataacattaactatataatataaaaataaagctgaaaaagcaatcatatttttcatcaaaaaactaccaaaaatgcatattgcattttgtgcaaaattgtatattcctctttttgtttttttgctttacaattaagctattaaatagtttatatggagaaccctttatgaaaaaagaacattttgagaaagtccgtcaagccttggacaccttcgacgaaggatatgattatgcatatgaatacgattctatgctccacgattacaacggctttatcctctaccaggccgaatcccagtttatccgcaaggtaggtgatgagccgggcatcacgattacagagctcagtgtgtttttcgataagaccaagagtgcctgctcccagctaatgtaccgcatgaaaaagaagaacctcctaaaacaagtgcgtaacgaacataataaccgagagtataatctctatctgacagacaaaggccagcagctctatcagttccacaaaattttcgaggacggctgttaccgccgcactgcggaaatgctcagctcttttactatggaggaattggagacctatataaaaatccagaggaaaatgaacgaagcatttcttctggacgtaaatgagagcaaagaacggaatgtccggtaagcggagaaatccctctccattacggtatgcatttccatcagagagataaagaccgctgtggctgcagataaaatggtaaacttctgtttttacacagatattcccgcagggcaactatggtcttttccagttcttacgcactggaaaagacagcatcagattttatctaagccagccccaaaattcattgaagtaatacaggataccataaataattattcttccggctgtatataaaatgccttcagcgcctgcccgataaacagcgtggagccatctccgtatactgcatccaggttttcctgcatttttttattggtaatatatttttcggccatgtccagcataagcgcggttacatcgtccatctgataaagctgcctgcagacaaagtccatttctcccacaatttcctttacctcaaatgtatttacatcctggccggtcttgtccgctaattttctggtaatctgctccagtctgtttccataggcatccaatatttttgaattctccggatttgcggaagctttgagagcgctttccttatctccataccattccactactttagcgaaatttttctgcgcctgcctggaggaagcgctttccagaaattgttccttaaactgttccatactgccatactcttttttaaaaatctcctgctgctcttttgtcatgtttgtttccatattgcggtacatatcctcaaggtcagccttgctgaaaacttcaaaattcatcttattatctcctttcagaatttccccgatgctggcgataattcgttccagtctttcttttttcactaccagcattcttttttggctgtataataattgctttttatcaagatcaggattttctaagatttctttgatttgcttcaggggcaagtcaaattcccgtaaaaacagtatctgctgcaatttttccagagctttatcgtcataaaaccggtatcccgcctcactgagtacggtaggcttgagtaagtcaatctcatcgtagtagtgcagcgtgcgcacgctgatacctgtcaggtttgatacttcttttacagtcttcatattctctcctcctgttcctgataccttaatcttatgctatgacgcagcgtgagagtcaacaagttttttgcagagcaataatccgctattctaaccgcagataaagaaacagcacaaattctttttccgtatactccacctccatattcccctcgtaacgttttgcaatttcccgtatattttccaacccgtatccatgtccggcttcttttttatccgactccatctttccatgggcacttataatccggttctctttgctgttggcaatcctcagactgaaatatcctttctttgtcctggcctgcagaaatacctttctttggaccggatccggaatcttgctgacagcctctatagcattgtccagggcattggaaaatatggtacagagttccagagaggttacttccatcacctgttttatctccagattgaagtgaacatcagcctgcagattctgcagtttttcccatcgatgattcagtacggcatttaatgccctgtcactgcagaactgtttccctgttccggcaggcagactgctgccgaactgctccagatattctccggctccgctgatatcgccctgctccagacagctctttatggtctgaaagtggttattcatatcatggcgcagtctccggacactctcctgctgttcttccagcgaacggtagtactcttctttcagtccttcaatctgaagcttttccctgttttttacattctcgatcacaggctgcagcagatacagaatccctataattgaaaggattccgctgattactatgacaaaggttctataagaaccgtaaaacagaccggggctgtcataatattcagctgcagttttcgcatcaaaaggaggaaatacaataacagtgaccatagacaaaaaagagattgtacagattacagatataatcagccaaatccttccggacatatagcgtttgatttcctctaagcgttttttaaaaccatagtacagcaaagcccaaaccaagactttcagaagatccaaaaataagccggcagcaaaattgagcaggtaatccaccgccgcaagatcattgctgttttgctgtaagaacatcataaaatttattttaaaggaatacaccggattgttgcataacagataattcagccccaggatcaaagggtaaaagattagtaccacagagagcctgttaataagctctcccttggtgcagattagaacgataaacaaaaaagcggccagcattcccagcacatttgtggcatctgtatcgtatatcggcaggggaagcaaaaacatacaccagactaggaacaaaaatctaagctttgttctgtattccaccaataaaccagaaagtctgtacaaaaagaaagagcatatgaggttcatgcacattgacacgatccataatacacttacataacctctgaccataacgcctcctactgctgcagaagaaatctggcaaatgcaccagacaactcctggtaatattttctgctcactgggatactatctttccctataagtacctgattcgggcggacttcatctgcataagccagattcaccacatatcgctgatgggtgcggacaaaacagccggggagctgcttttgcaactcccccagctttccgtaaaactccagctgcccgtttacagtattcaaaacaattttcctcagctggctgtaaagatacctgatatcccgtacaggaatcttactcaggctgctgccctgctgtaccggcagacaccgctgcctatccatctccagccgtttcacagcctcgtccagtacaagtgtaatcttctctctggcgtaaggctttacgatgtagtttagtgcacccacttcgtagccgtggaatacataatcctcatagcccgtaacaaaaatcagcacagcttccctggaaaagtgtcggatcctccgggccgtttctacgccgtccaacccgttcatctgaatgtccagaaaaataatgtccgtcccataggggtcctgctgtatcttctgcagcaggctttcaccaccttcatattcttctactttatattcttctcccaaaagctgaaaataggattctgctatccttctcagcatagttctctgctgcttctcgtcatcacaaattcctactgtcaccatgcagtcacctccctcttgtcattcatctgtccctgccgttttccgtatgcccaccagatgctgaaactttcgttctgccgctctgtataccagataaatataaccaaaaatcaggcagatggcaaggagtatcacacccacggcccggatttctgctgctgctatgattccgtcattctgccaatagataagaaacacataaaagagggaaacagcaacccccataaaatagggaaaaaagaagatcttacgcagctggctgcggatacagaacctgatatatttatggctggctcccaggcgctttagatccacaaacacctgcttgtaatttatcccaatggagaccccccttgtataggcaatgacacccactgccgtcagacatacgatggcaatatacacaaacagcataatatacacagacatatttttcagcatatcctgagcaaggagaactttgaattgggggtaatatctccagcttgtgctcagcatactattctctgcctccattttcagattgcccactcccgggggatattcttcatccataaagtaggggatcccctggctctcatatctgtattttacatagttgttgtacccggcgtataccgacgcagccttcgacgtgcggaggattatctgatttttcagggctgatgcaaacccataggtttccttccagttttccacatcaaaggcagttgtcacgtatttgttttctggcttcagacgactgctgtagctgtcaaattcctgatcgtttagcacataatagatattgcccaggtcattcaccaaagagacatcaaacagcacatttcccccataagtcagcttttgggatttcccggtggatgggtctgtgataagcagatctttctccccgtccgcatgtttatatgcctttttcactgcaatcccgtagctgcctgcaggtatcacaacatctctgcccgttatttctgatatgtcgccagctttcaggaacatagcgcttgccatacgttccatataggtttccgaaatactgccgtctttatgatagatttcctctgttccgtcaataatgaattccaaaacctccagctcccgataattcttcacctcagtattataggtatccgccaggtttcggacttcttcttctgtaatctgcttctccccggccggataggtaaacaggtaatctacaggcatattcttaatgacctcctgattttgggtccatatgcccggcacatagatgaccgcaaagagtcccccaaagaccaataagacaatgacacagatatttctcacagtctggcgtcccataaaacgcatcatactgatagagataatatttttatagtatctctggggattgcggcctttcttcccatggactaccagatagacggctgtcatgtaaacacctgccacagccagaagataggtaaggctccatagcgccggctgtctccgggagaacaggattctaaatatgtcatatccaaaatagccaagcagaaatcccagaatcaccagtccgattcccgctccgccgtaccagcctttcacgtcccggacaggctcagattttctgtgatcatttaaaatctccataatattgcttctgttcaggaatcgtatggcctgaatgaagcagcatacggtaaccgcggcagcaaaaccggctcccacccccagacctatgggtgcaaattggtagcgcatctccctggtatccacaatcagcagctgaaacaatccccagacacctctggaaacagggatacccaataccagtcctataagcgaagaagatgcggtaaccagacctatatccacaaacagtacagaccgcagctggcgtttctgagcccctatggccataagaatccccatctctctggatttatattttagaaacagggaagatgcgtatactgtgaagattccgcagcccaaaatagcggcggcgaagatcattgttcccatttttctgctgtctcccccttgaggaagaaagttctgtactgttggactgaaataaatcatggcataagaagtaataagtgaaacagacagaagaatacagaaagtcagcagaaaataatttttacggttatagctgcgaagctttccatatattttattcagagtcatggcttcctcctcccacttcccggatgacctccagaagagtatccatgaattcctgtctgtttccctcatttcttacttctctaaagatacagccgtccttcagtacaatgactctgtcgcagaagctggcgacatagctgtcatgggtaaccataaagatagtagcctgcagttgttttctggcagtctggaatgcgtcgattactgcctggcaggatttgctgtccagattaccggttggttcgtcagccaaaataacggagggatggttcatcagtgctctggcaactgctgttctctgcttctctccccctgaaatctctgcgggatatttttctataatcttctcaatcccaaaaattgtgcacagctgtctggccctgttctccatctgcagcgcctgactgcctttaatcacctggggaacacagatgttctccaagacagtcagaccgtcaaagagcataaaatcctggaatacaaatcccagcttttcattgcgcaccctggacagttcctcttccttcaagctcttaatattctgctcccccagaagaacttctccacgctcaaagggaataaaacaagaaatacagttaagcagtgtagtttttcctgaccccgactgccccataattgcagcgatctctccctcctttatttcaaatgacacatcctttaatacaggatatactgtcttccctgaggtataagacttgtataaatgacttaccttaagcatacattaccctctctttctccttgtttcctttattagactgattttagcaaatcttttgatctgagcatataagggcagatgtaagacttgaaccatattttgtaatacaaaaccaaattaagaaatacaatgtcctattacaggtttttgtgatataattctttatatgactggcgcccattaaccagggactgacaatgcacaatatctatgccaaagtataattcatatatagggggacacatgaaaattaaaaaaaacacaaaaacaatctttgcgttctttctgctgctattgctgctattgggttctttgcagcacaccgcttttcttgtacaggctgaagatgccgtgccggaaaaaaaagttcttaaagtggcatttccttatattaaaggcgtgagcgagacggatgagaaaggaaatcacaaaggcttagtggtagattacctcaatgagattgctaagtataccaattgggactatgaatatataaccggggagtccgaggagttgattgcgaactttatggacggtaaatatgacttgctggggggaacttattattctgaggacctggaagggtatttatcctaccccgattacaacatggccagcaaccgggcggtgctcttctgccgcaaagatgatcttgacctgagaacctatgatctcagcacactaaacggcaagaccatcggagtatacgaaaaagcagacgaaaagattcgcagactgcaggagtttcttaatttcaacggtgtggaatgcaaactgaaatattatgctcaggcggacatggtgaacgccacgctctatcatcatctggaaaatggagaggtggacctgttattgggaaatgatttggaagacattcaggatttccgtgtgattgcttcctttgaggcacagccttattatattgcagtcgctggtggaaaacaggagattctggacgaattgaacacagcccttcgttatattcttgagggggaccctgattttgcagagaaacactatgcactgcattttcctgaacagcgcactgctgatattcgatacaatcccgaagaactagaatatataaaaaatgccggaaaaattaaagtggcggcagtaaaggactggcatccttattactgtattgacggggacaaacagcaccataatggaattataccagacatcctggatgagatctctgactcttcgggactggaatttacctattgctttgcagatacttatacagatgcaatccatatggtacaggagggaaaagcagatattctggggtggtttctggatacagaggacgctgcccgggaacagggactggctctgactaagccctttatcactatgaataatatgatagtgaaaaacaattcggtgagctatccttccggcaatcttacgggagctgttctggagggacgggttctccccgaggatgtgcaggctgaacagaccgtatactattccacgacggaggaatgtgtaaaggcagttaatcagggagaggccgactttgtctatggacttgcaacctctctggaaacagaactgcaaaagcccagttacagaaatattacgccggttaccttttacaataccagtacctcagtttcctttgctatggtgcgtccggtggacccggaactgctgagtatcctcaacaaggggatcagcgatatcccggaggaaaagatggacgctgtcacaggacgtaattttgtctccggcagctacgtaccggtgactctgaaggaattgatttatgaaaatcctatggccgcggtcttaatcgttgcggctttcctgctgctaatcctgctggccgttgtattaattgccagatccagagtaaaaagtacggtactgcaggcagagttaaggcgtgcggaggcagaaagcaaagccaagggtgaatttctatcaagaatgagccatgagatacggactccaatgaatgccatcgccggtcttgtggatcttacctgcatgaaagaggggctctccggtgaagtgaaggggaaccttgagaagatacgttcatccacaaaatatcttctggccctgctcaatgacattcttgatatgtcaaggctggacggcggcatgcttaccattgcctcagaacctttttcactggataaactgttacgtgaagtagaggaaatgaccaggatacaaactctgcaaaaagaccaggaattcaacttccagacagatattgcgcacagcggggttaccggagatcccattcgcctccggcaggtcctcaccaatcttctttccaatgcaggtaaattcactcccccaaagggaatcatcacactggaggtaaaagaagaagcttttgaaaatgacagggctgtgtatcggttttctgttactgatacaggggacgggattgctcctgaattccagaaacagatcttcggcgtttttgagcagctaggcaccagcagttctaaaagcgagggtaccggacttggacttcccataagtcagaatattgtgaagctcatgggcggggaactgatggtgaatagtaccccgaaagagggggcagaatttttcttcacgttaagtcttcctgtagtagctccggatgaaacggaagccataaaaaaagaacccgcgtcggaagagtcatttagaggaaaaaggattctgcttgcggaggataatgatttaaatgcagagattgccgaagagcttctaaagatgaaagggatactgaccgagagggcttgtaacggccaggaagctgttttcatgtttgaaagccacaaatccgggtattacgatttgattctcatggatctgcagatgccggtaaaaaacggtctggaggcagccagggaaatccgaagcagtcaattatccggaggaagcactgtccccattttagccatgacggccaatacctttcaggaggatatcgacgctgcggaaaaggcaggaatgaatggatttatcacaaagcctgttgactccaattatatgtatcagaccataggtgaatatttgtaatcaagcaaaggaggaattgctctcagacagcaattcctcctccactgtttatatagcctatccccagaatcccttttacgatgctccacagcccatttaatatcccgttgtccataagggtcagcggtcggctgagaacacctgtcatcagcaatacaatgagaataacgggcatataccggccagccctctggtaatagtactgtaccctgggaaaaagttcccgcagtacattggatccgtccagagggggaatgggaatcaggttaaagacgcccagccccacattaataacagccagataataggacagataatagaaataggcaactatcccagatgggacccctccaaagaagcggactatcaggccaaatacaaacatagatacaaatgccataaaaaagttcatgacaggaccagcaagggccacttgaatcattcccttgcgcggatctttataataccggggacagacgcggactggtttcgcccatcccatgtgaaacaccagaagacacagggtccccataaggtccagatgcctgagtgggtttacagacagccttccatccagtttaggcgtggggtctcccaggcggtaagaaacgtagccatgagcaaactcatgggctgtaatcgccagcaaaactgcgggaaccgtatagattaactgctgaagaatctgataataatagctcgaatacaacatagcacactctcctgtttttatcatcttaaacaatctgctttcatacatgttctttggcagatgtacggtattctccgtacattaaagttataatataaagatatccagagatagtcaatgtaaattatatgaagaaaccataaaattaaaataccatgcaaaagagcatggtattttaatcatcttcttgtgtcatctcacacaaatcctgaagcagatgcagcagtttctccagaccgcaccggatttctctcagctcttcctggggctgctgctgaatgtatgggtcatacttttcagagacagcctgttcgatttcccgaaccatgcgggagccggaagccgtcagggtaagctttaccacccgttcatccagggtgtctctgcagcgggctatatatccgtccttttccaggcgtttacacatggacgaggcattgccgctggccaaaccgatggttttgccaatagtacccactgtctgctcttctgtgtgatggagttccagaaggatccgaatctgaatcatagtcagtcctgtctcgtcaataataggcttaaaaagcttccccatatatccggtaatggagcgggtatagtcccatatctcatttctcaaatcaatgctgttcatcagactgccctcctttctctgactgacatacaagcgattaacggggatccggtatataattccatggtgaaacataggttccgtttacactgacgccaaaatgaagatggtatccggtggccactcccgtctgccctacatatccaatgacatcaccagctgataccttagtaccttttttcgcgctggaagcgcggctctccatatgcatatagattgtatgtaatccgtttccgtgatcaatttctacatagtttcccatctcatagtgagaggaagcattgatgatagttccgcctgccgccgctaaaatcaatgaatttttaggcgcagccaaatctacgccctggtgataagaactggctccgctggtaggcttgtccctgtacccaaagtcactggacacccttgtatacgccgggcagggccatttcataacggtggatacataatggccgtcggctcctacatatttatctccgatccactgtttcacagccatagcaccggagcttgtaaggtagcagtcatcaacccagcacccggaagccatagcaccggaatcataaaagtaatatttatattttccaatggtctgccatccggtctgcatggccccgctgccgttgagataataccaggtactgccaagtttcagccagcccgtagccatagcgccgctgccgtttaaataataccaggtgctgccaagcttcagccagccggtggccatctttccatcctgttctaaataataccaagtcttgcccagaagaatccagccagtcaccatctgcccgtcgctgtcgtaataataccagcttccattctccgcataccagccggtcaccattgctccgttctctttaaacgtatagggctttccggaaactacagcttttccggtctgggcggatccgttaggagtcagataataccagatcccttcaagctttatccaatccgtcttcatagctccgctgctgtcaagatagtacaggtctgcgcctgactttatccaaccggtctgcatggccccgctgctgttgaaataataccaggtcttaccgtcaagaagccatccggtctgcatagcgccgctgctgtttagataataccaggtcttgcccagtttcagccatccggtctgcatggctccgctgccgttgagatagtaccaggtacttccaagcttcagccagccggtctgcattaacccgctgctgttaaaatagtaccaggtatttccaacccaaacccagccggtctgcatcataccgctgccattgagataataccaggcttttccctgcttcagccagccggtctgcatagctccgctgccattgagataataccagtacttcccgtccaaaagccagcccgttgccatacttccgtcctctttcaggtaataccagagagcacctgacttaacccagcccgttgccatatctccgctgtgggaaaggtaataccaggagtttccaatcttctgccagcctgtggcggcaccgccgtccggccggagataataccagactccctggaaaagatgccaccctccggaaagcatagctccattgtctttaaaaaggtaagtggtattgcctaccattgcttttcctacagccatctgaccgctgctgttaaggtaataccaggtattgcctaactgaagccagccggttttggcagttccgctggcattcagataataccagctgccgtcagtatccagataccatccgacggccatactcccgtctttgttcaaaaaatacagagttccgtctaattccagtcttcccacagccatttttccgtcactgtaaaagtaataccagtcgctgccaatccatttccagccagtcacagaaacgccggactgaaggtaataccactccccttcaaagatatgccagctgctgctgtcggtccgcagatgtccctttatgggatcaaaataataaagtacatgatctatccttgtaagcccaagactcagactcccgtcttcctgcaaataatatcgaagactgccttcggacatccatccggtggctttggtcccgtcctcccggtaaaagtaccagattccctcatcctcgacccaccctcttaggggcatctgcccctcctcattgggcggcgcagcatcctggggggaagcttttggcacctttgcagcagtcctggcttcttcctgaaactctctgctgttggattcctcagagacttctttttcctgtgaatcctgaggcacggagccagattcctccccggcagctgcattttcatcttctccggacaaatcctccggatgctgaggctcttccccgggcgctgtctgttcctgtgctttccccggaccttccccgtaaaccggtgatatggctgagaaagtaagactgacaaccagcccgtacagtaatagtttcttacgcttcatttctccgtctccttctcttactcaaaggttttatcatccagcagtatagtaaaaggtccgtcgttgataagcgaaaccttcatttctgcgccaaattcccccgtctgcacagggatgcctgtttccctgatcttctggatcatatattcatagagtctgttcgcctcttttgggtccccggactcaataaagctgggacggtttccttttttacagttagcatagagcgtgaactgggaaactaaaagtatctggccgcccacatccttcagggatagatttgtcttgccgttttcatcctcaaaaatacgcagcccggtcatcttcttaataaaccggtctgcaactgcaggggtgtcctctctgccaatgcctgcaaataccagaaacccctgtttgatactgccgatacaggtctctcctaccgttacagaggcttcttttacccgttgaattactaatttcatagctgtgttatttctcctctttctttttttcctctctcctgtcttttgccatttccggacagggaattggctgaagagtagcttcatcgatacagtccatctccacgtaagaggcctcatccgggggaagtgacttttcggtaagctttttgctcctccaggacttgaatgccgcgtatataaccgccataacaggtaccccgataaacatgcccagaataccgaaaactccaccaaacagcaggatagcaacgattaccataaaactggacaggcctgtggattctccgagaatctttggacccaggatatttccgtcgaactgctgcaggatgaggataaagagaataaaatacacacactgcataggattaaccagcagaatcaggaatgcacagggtacggcgcccaaatatggtccaaagaaaggaatcacattggtgattcccacgattacgcttaccaggatagcgtaaggggtaccgataagactagtgccgatatagcacagaattccaataataaaagagtcaataattttcccgctgataaagcccccgaatgtcttatgcacaaaacgaagattagaaatcatatgattggccttttccagaggcaatatggaatataaaaacatcttcccctggccgataaatccttctttgtccgcaatcagatagacggaaataatagccccgattaaaatgtttttcagaaatattaatacatcaaaaataccggaggaaagctgctgaagcagatctttcagctgtggaagaagatcctgcgtcagccaaacctctgccttggaggaaaggcgggtaaacatatcaaatgccgtggcctccaaatctggattgtcttccagaagtctttcgatccagtgttcaatattttgaatataccggggagagttattgatgatattaataatgctgtcaatgatagacggcacaatcatggctatcagtgtatatataatggtcccggcaaaaatcaaagccagaaatacacagacatagcggatgactctctgctttctcttgtttaggctgatctttttcttttccaggggttcaaagatacacttgtgctccaaaaagtttacaatagggcttaacagataagctatgacggccccgcagataacaggcatcataatgtttttgataatatgaatcccattcagcagcgtattcatatgaaagattccaaaatagaaaagcaaacttgcgcaaatcacaagaaatgctgtaattccccaataaagatatttattgtcccaacgaaatttcataacagcctccaattgataatgatccccaggagtgaaaacacttcccgcagacgctaaaagtatatcacaaatttatgactttgtgttgcaaaaatgtaaaaaatgtatttcttttttttgtctgttaagatataatacttatggctaattggaggaaaagagatgaaattacaacaattattgagttatacaagaaaagcagtggatgaataccagcttatagatccaggggataaaattgcagtaggaatttccgggggaaaggacagcctgactatgctttatgcgctccacggtttgaagcgtttttaccccaatccatttaccatagaggcaatcacagtagatctggggcacccgggattctccacagaacctatggccaatctctgcagagagcttgaggttccttatacggtagttcccactcagattgcacagattatatttgatgagaggaaggagagcaacccctgctccctctgcgccaagatgcgaaaaggggcgttaaatgaagctgcaaaaaaactgggctgcaacaaagtggcttatgcccatcataaagatgatattgttgagaccatgctgctgtcattgatttttgaggggagatttcattctttctctcccagaacctatctggatcgtatggatctaacggtcatccgtcccctgatgttcgtggatgaagctgatgtcattggattccgaaagaaataccatctgccagtggaaaagagtccctgcccggtggacggctatacaaaacggcaatatgcaaaggaactggtgaagacactgagcaaggaacatccgggagcaaaggaacgaatgtttacagctgttttaaacggtcatatacagggatggcccgaacgggttccccacataagataaaagaagagacgggatgacagccgtctcttcttttatcttatcttactttttctgatgagcgttttttacttcaattgctttcttgatcagttccacacagccttccattccaaggaccccgctgtccagacacatatggtagccattggcatctccccattttttgctggtgtaataattgtagtagctggatctttgtttgtctgtcttgtggatcttctctttggcagctgcatctgtgagttcatatttttttgcgattcttcggatcctcttatccagatccgcatggataaagacactcaggcagcccggatagtcagacagtgcataatctgcacagcggcctaccatgacgcaggattcttcttccgcaatctttttaatggtctcaaactgggcgaggaagactttatggttaatgggcatatctgtaaatgcggccgatgaatagccaaaggaatatgtatccatcaccagagagtagagaaaactgtttgtaggcttctcatcatgattctgaaacaattcctggcataaaccgctgtccttggaagctctgtccagcagttcactgtcataatatttaattcccagctcttctgctaaccgctgtccgattgctcttccgccgctgccatactggcgcccgattgtaattactgtgtttgccataagcacacactcctttcctgtcatttccctccgtgtactgacaaatttcataggttagtacactagtaatctatatatattatatcgcattttatgcaaaatgtatatacattatctcaatttatccagaatttcagaaaagtattcaggtagaggtgctgtaaactccatatattcagaagaaacggggtggagaaagcccaataccattgcgtgcagtgtctggccccggagacccgggaatggacattttttcggaccatatacatcatctcccaaaagaggatggcgaatgctgctcatatgcacgcgtatctgatgggtgcgcccggtctccagacggcattcaatgtacgtgaaagagccaaaacgctccagtacccggtaatgggtaactgccggcttaccgtttttctgggtaactgccattttttttctctcggtgggatgccggccgatgtctccggttactgtgccctcatcctcctttaggttgccgtgtacaatggcccggtatcttctggtaatggagtggtcctttagctgcagggccagactttgatgcgcccggtctgttttgcacaccacaagcgccccggtggtattcatatcgattctgtgaacaatacccgggcggagaactccattaatcccggacagctgtccctggcagtgaaaaaggagtgcattcaccagtgtatgcgtgtaatgtcctgcgctgggatgcaccaccatacctttgggcttgtctacaaccaaaagttcactgtcttcatagaggatcgacagtgggatgttttccggctgaatgtcaggctccttttggtctggtatctctatggtgatcgtatcctccggctgaattttatagtttgcctttaaaggctgctcatttgccagaacgcagccttccttaatcactttttgaatataagaccgggaatactcaggaagcagaagggaaagatatttgtcaacccgctctcctgcctcgaattcctctactttatagttatacttttccatggacggtttactgctcccttttctttaaaaactgaaagtcttcttctttgtaataaaaaatcacatagatgaaaaacagcacggcagagactgtcacatagatatctgccacattaaagaccggaaaattaatcagggagatatagacaaaatctaccacataatttaaacgtatccggtccagtacattgcccacagctccggcggtaatagtgacggctaatatatgcataggcagataatgtctggtcttgggcatcttccagtatgcagctatggctgccaggaaaaacactgcggcaatcagtacaaagatccactgctggttttgaagaatgccaaaggctgctccccggttttccagataatgaagggtgaggacaccgggaatcagatcaatatccctttgcccggccaaatgctcaactgcaagggccttggtccactgatccagacccaccagaagcaaaagggcagcaaacccgcccaagatagcctgtattctgatttttttctgaggttccataacaatttgtcctttcctaaacagcgtcgattacagtaatcgcatccagaagctccgaatcggtaaccgaagtgtctatcacagcatgccccatcctgtccatcagtataaattttatctggccgtgttccatttttttgtcggatttcgttgcggatagcacctgttccggggagagtccgccgactcttacaggcagaccgaaggctcgtaaatccttttgcatctttgcgaattcttctactgtaatgtatcccttctgaaaggacaggtaggcggaagctaccatcccaagcgccacacactggccgtgcaggatcgaaaagttcttaagcttttctacagcgtgccctatggtatgtcccatattcaagactgcccgctctcctttttctgtaggatcgttttccactactgttttttttatgacacagctgcggtaaatcatctctgttaaagtctcaggcactctctttaaaatctcttctctgtgaaatacggtccaggcataataggaataatcccgtatcagaccgtgttttaagatttcgcccattccgcaggagaactgctcatcggaaagacttaaaagagcagagacgttcatatacaccatcaaaggctgatggaatgcccccaccatattcttatattgatcgaaatccacccctgttttcccgccaatgctgctgtctacctgggcaagaagggtggtgggaacctgcacaaacgcaatccccctgaggtatgtggcggccgcataaccggtcatatcccctacaacgccgccgcccagcgccagcagaagatctttgcggtcataatgattttcgatcagatgtttatagattttctgaatctgatccaacgtcttattctcttcccctgccgggatgatatgggtagtaatctcaaagccgctgtctctcaggcctttggctgtttcctccagatacagaggggcaacattgctgtctgttacaatacatatcttctgaaagctcttccccactgccagaatcttctccggaagctcccggaagcttttctcaaaataaatggagtacgtaaattcacccttccgctgtacttttaattcctgatacatgcttttgtctcctatctgtaacggtacaggcagatactgtacctgtccttttttgtctgcttcagtacccgggaatactgaaattttccctttccccgtactgaaataatatcttcttcctttagctgatagccgttggaaaccaccattttcccatttacatatacttttcccgtttcaatgaagggaagcatctggcttctggatgtgtgaaaagccagtgccagaaccgcgtccaggcgcacagaggccaccgtaccagtaatttcttcccgctttctctcaggaaggccggacaggtccgggatctttcgtgcaaccacccctgtattcctgattcggcacaattccccggaaataaattcagtaagggaactgtggcagaacaaataggcttctttttcatccaccaggatgtcacccagcttacttctctggatgccgagattgactgcggctcccaggtaatccctgtgtgagagcggttgtgcgaacctctttgcaagaggctggatacaaagacagtccattggatattcccatccattccccaggcagacaccctgaacggccccttcggagggacgtaatacataagaaagagcatcagggatgaatgctgccatctgacgctctgctaattcatacccaccgcaggtcttcagagttacccccagctcccggtagttaatatgatttaccatatgtaattcgttcaaatccaggaaatcagaaaatgttacaatgtctctctgataagcattctgacataattcctggattcgctttatgaattgttcttctttttccatagattatccttagaactcggtacggatcgacggaaagtcaaatgcaccgcttaaaatttcctgaaaatcaccggtaatatccacatcagcaggtgttaaaataaagatgtagctggataccttctgaagactgccgttgatggcataacaggatccggaagtaaagtcaataattctctgggccacttccacgtccagtccctccagatttaataccacggtacatcctgccagcagagtatccgcgatttccctggtgtcctccattgacgttggcttaatcacacaaacctccattgcacttgatacttttttagtattacgcataggcgtaaccttagatgaagctgccttaggctgcttggcaggccttgcactgctgggggcagcagttgccgctttctctgctttggccgcttttttggctttatgaaaagaggttaccggtgccgggtcatcatagaactcatcgtcatcttcttcctccagcttctttaagaaacgttttcttggcttctcctcttcgaagtcgtctgcatcatcaaaaaattcatcgtcgtcgtaatcatcatttaatttgattgcatctaaaaacttatctaaaacgcccattatttaatctccattcttttatactgctgcgtaattacgctcaccaaagatgcctgtccctacacggaccaaggtagccccttcttcaatcgccacctcataatctcctgtcatacccatgctcaggacatccatagtaacattattcatgttttcccctttgatgtcaacacttaaattctttaatttcctgaaaatttccctgttatcttctggatcttcaacgtatggcgctatcgtcataagtcctttaatagcaatattttgcagttttgccacttcctgtataagaggaagtgtctcctcaacggaaactccgaacttgctctcttcccgggctacatttacttcgataagcactggcataaccagcccttttttttcggcctcgtgatgaatcgtctctgccagtctgagggaatccacagagtgaatgagacatgctttatcaatgatgtacttcaccttattcctctggagatggccaatcaaatgccagtgcagatccttaggaagttcctcgtatttggatgtcagctcctgaaccttattctccccaaagtcctttactccaagaggaagcagttcctcgataagccctgcaggttttgtcttgctgactgctataagagtgacctcactgcggtcccttcctgctttttggcaagccttttgtactttctcctctactgctttatagttctcttttacatccatagtatcatctcctaatataatatatcttcttcttttacagagttgccgttcaaaacaatatgatcaaactgggcaattccataggaagtatctttatctacaatacaatactcatcgttctggtccagaacagagattttgcggaagacagcgtatcctttattcatactgtatacgccttccagttccgcggtctcaccaatgacatagttttgactggaatcctgctttacaatgacatccccctttttgaaatcagacgtttctacatagtagctgccgtcttttaattcataaagggttgtactgataaattctgtggtagtctttccgccttttccttctctgcggaccaggaagcccgcttcctgctgattgttcccctgggttttaaattcctcgggaataaggtagaattctttgctgaccacagaggacatgggtatttttaaccctgtttttgtgttggttaccagttctatatcaagaaagcggtctgaggcgtagcgcaccataccgttgctcagatcgatttgtccgtattttccgtcttttttttccactatagaaaagccgcccacctgagtagccccgtccttgagaaacttgactttaatggcagttctgtcagccagttctgcggcctgtttatctgtcagcggaatcataagtgtccagttttcatctgtgaccagcttgtacaccggttcccctgcctttacctgggaatctgagagcagatgattctgctgataggacatctggctgaagctgtcctctgacacggtatcaggagttaagctctcgtacccgtctgtggagtacaggactaccccgtcataaggagcattgtatatagtctgtgtgccgaaggttgcggatacggaatccgtatcctcccccgaggcccctatgcctgcggactgaagaatggttccctcaatctcatattttaggctgtatacatcgtgaaaagtatctgaactgaaattattggcgaatttggcaagctgtgatctgattttttccagatctgcttcctttagctccatatccgcagactgggcctttgtatcccctacggagtatattgtgcctgccttacgtactttgcttccctctctggcatagtatgtgacatagccggggctgtctgccgttaccacttcctctgttcgcagagccagtgccgtgtaggtctgattcttagccaggggacctgctgtcacctggtaggaggtgacgtgggtggaggtgacatagagaagaaccgtgatcagcatatagataaaaagtgcaccgaaaatcaaagtgcctatatttaacgtaagcagcttttttgcgcttgtaataatctttttcagtgtttcaagtattttatttctgactgacaaattgatagtctccttctgtctggtacaatacttttacatcagttaacattgtaccattttccaactttaagtacaacatggaatttcgaaagaaaaaaatggtatgaaatgtgtttttctggtaaaaatataggataaagaataaggaggtagtcattatgcgttcaaaaggaatcgactatacaatacttgtaattgcaattatcggtgcagtgaactgggggttaatcggattcttccgctttgacctggttgcatttttatttggaaatatgtcctggatttcaaggattatttatgctgtcgtaggactctgcggattatacttaatcagcctcttcggcagaatcggcaatatgggccaggaataaaaaacaaaggactgtcgcaggtttttgcagcagtcctttgttttttattatgtgtattataacgatacaataatcttatccttcaaatcttctggcagttcgtcggcatctttagaaacgctcagggtaaacgtaatagaaaactctttgccaatggcttcaatctgtctgattgtaccggcgatgtccccatcctccatctgttctaattttgaaatattcagaaagctgtccagatacatttcctccagatcgtgatcctgtgaaataataccgcagataaaacctacaaattcatcaggattctttagtggaaaggtagatacatcaattaaccttactttattattcagctcgtacatgtgttttacatttttgtccagatataccacgctgccgttggctgatttgatcgttttatttaccctgtccaatagttcttttgtctttccttttccctttttgcctacaattaattgaaccatcgcaatttcctccttgaacctacgtaatatgtatttaagccaaaatgttagttctgttaggtacaattatagtgtatttaaacaaaaaaaacaatggcaaatctgaaattttatgaaaatttacgaatttattttctggagcagagaagtcatctgctcatataaaatagatttcgttttggcattcagcacgatggaaatgtatggctttccataggcattctgggatacaatggccagacatgcgcctgcctgactggtggttcctgttttaccgcccaggatcgttacatccttaggagttgaaatctcaccggtgagatatttatcggtggcctcaagggcaatccgcccttcctcaccgctggccttttggtacgtgagggtataggaactcatctgggatatggtggtgaattctttgtaggtaatcgcctcattgagcatcaggtaaatatcatacgcagttgtataatggtccggatcgtggagcccgtgcgggttcacaaaatgcgttccggtggcccccagacgcagagcctcctcattcatcatctgtacaaacccatccacactgccccctacctgacgggcaatggccatggccgcatcattgccggaatatacaaggagcccgtgaagaagctcgtccatagaaactttatctccagctctaaaaccgcaaagctgtgcaccctcttccagtgtaacgtcttccgcttcaatggtaacaacgtcattcatattgccgtgctccagtgccagtatggcagtcatcagctttgtaatgctggcaggatatgttttctcaaacatggattgggaaaacatcacttgttttccatccacatcaagcaaagcggatcgctcgctgttttgaggcgtaattccctctaaagggatatctcccgatgctacacataggttataggccattccctctgccacctgtgaagtgtcgtctccggattttccgaatacttctgtctgcagactgtaagggagtacctcatccagtgctctgtccttatgaaacatcataatgcttaaagcaccggccaataccacaatcaccaggaaaagacttaaaaatatagtccggcgcactttgcgcctgcgcagttccctgcgggttctctttctgtttttatctgtacatttcacgccagtctaactctcctctgtccaaagacttaatcagtaattccgctgaggccagattggtggccagggggatattgtgggtgtcacacaggtggaagatacggttaacatcagggtcatgccgttttggagcaacgggatctctcagaaaaataatgagatccatctggttttgctcaatcagcgtaccaagctgctgttctccccccaagtgtccggcgataaatttgtgtaccggcaggttgcactcctcttcgatcagacggcctgtagtacctgtggcatacagcgtgtgcctgctcaaaatgcccctgtaagctatgcagaaattctgcatcagttttttctttgaatcatgcgcgataagtcctatattcatgatatttgacctcctatatatgttttacttttttgcagtcctacatttaaaaccaagcccataccaatatacagactgacaatggaagtcagtccatagcttacaaacggcaaaggggtccctgtgttgggcattaagccggtagccacacagatattgataaagctctgcaggccgataacggagcccaccccgcagcaaatcagcttacccgagaggtccttggcccttcgtcccacgaatacacattcaaatataataagcagcaacagccctacaatgcagcagcagccgataaagcccagctcttcccctgctacggcaaagataaagtctgtctgaatctgggaaacgaagtttcctttgttcgcagaggagacctcgttgttatccaggcccttcccggtcaactgaccggatccgatggcaatcttagagttttcctgctgtgcgatatcatctgcgtactcttcattttctggatacagccaggacataatacgatctctttgataatccttgatcagtttttgatccggctgtacaacaatggtcagaaaaataacagccagaggtatggtgatcagcagggcaccgccgattattttatagcttagccctccgatgtacaacaggatacaaaaaagtataacaaccgtaattgtatttttcaagtcaggctgaataagaataaggacaaggggcacagcaagaagtataaatgactgcaccagcgtccgaaacgtattcaagtcatcctcgtgttccatgaagtattttgcaaagaacataattaaaagaatcttcgaaagctccgtgggctgaaaacggacgaatccaaggtcgatccagcgggtagctcctccggcagaactgccgaacagccgtacggccagaagcataataatattcccgaagtaaataatccagtaaaaattcaggatccagctaaaatccatcagagaaagaatcagcattacggcaagccccattaccactcccattacctggcggctctgcagtgaatgctgggcacttcccacaaggagaattcccactccgctgatggcaatcagccatagaactaatctgaagttgtaatcttttaatttgtattgttttaacatgtagtcaccttagtattttatatcaatttcctgtttcgcatcccgttctgctgagcagaaagtggaatccgggccgacagggcagagggattcctggtaaacttaatctctactctctcatcatctatattgaaatatttactgacggcctgaatcatatcgttttttatcattatcatcatttgtggagtacagtcaattctttctgaaaccagtaaaagcttcagcctgtctttggcaacggcgctggaacgcttatttcttgataatagaaacaatgaaatgtcctcctttatttactttttaaagaaactgcccaggcgtcggaatacaccctttttcacttcaaagtccagaagcggaacttcctccccctggatacgcctgcagatattggagaacgcctgcccggacaaagattccttgcagcagagcggttctccctgattggtggctatgaccacttcctcgtcatccggcacagcccctaaaagagagactgccagaatatccgtgacgtcctctatagacatcatttcccctctttttatcatatccgggcgaaggcggttgatgataagctggatatcctccatttcattcgcctccaaaagccctataattctgtccgcgtcccgaatggcagatacctccggagttgtcaccacaatggcacggtcagcgcccgcgatggcattcttaaagccctgttcgatgccggcggggcagtccagtattatataatcaaattccttggaaagctcctgagtaagctttatcatctgttccggtgtcactgccgtcttatctcttgtctgggcggaaggcagcagatagaggctgccgtactgtttatcttttatgagagcctgcttcagtctgcagtttccctctatcacatcaataagattataaacaatacgattttccagtcccagaactacgtccagattgcgcaggccgatgtctgtgtccacgacaactacctttttatccaactgtgcaaggccggtgccaatattggcaacaacagtggttttcccgacccctcctttgcctgatgtgacgacaattatttcactcatataccatcctcctactatactatccctttttctgtcatcttatggtacatttaaaataatttaattcccaacgtattttaatcggtctgagatgtacctacatagctagatgcagtacctgtcagtagtgaagcttcatcctgcaagtcaaatttgtagcttataacttctcttgccacagaggccgcatttgccgaagaataaccgttggcaatacggaccgcaagggcaagctgaggttcctctactggtgcatatcctatgaaaagaccatggctgggtcttgacttgctctgctgagctgtacctgtcttaccggcaacactgtagttcatgccgttaaaggcttcattattctgtaccacctgacgcataccggcatgaatggtattccactcgctgtctcttaggtcgatggtgctctgtacttccggggtaaagtcttctaatacattcccatcggaatctgttactttatccagcagcgatatattatagctggtgccgctgttggctattgttgttacatagcgggccagctgagaggttgtatagttgtgagtaccctgaccaatataggagggaactgcatttttatcggaaatctggggggatgcctcagagatctcgatcccggaattcttatccaggtcaaacagtgaagcgtactgttccagtttttcaaggccaaggctctccgagaagttttcttcactgtccagccccaggcgatatcccacttcatcaaagaatacgttacatgactctttgatcgctgactgcaatcccagccagccgtggcccccatggttccagcaccggatgctgtatcctgctttattaaatattccggtacagtcaacaccgaagtcatcggtgataatgccctcctccaggcctgctaccgctgttacaatcttaaaggtagaaccaggcgctgtgcgctgctgggtggctttgttgtagaacggctgcgaaaggtcagcagccagggcattgtagtacgcggtatccatctggttggcaagccggttgttgtcatagccggggtaagtaacgcaggcaagtatctcacctgtgttggggtctgttgccacaagagaaccggaacatggatccaaagccagctgcgccggtgtgatctccagtttgttgattttgcttttcataaagtcataggccgtaagtcttccggaaatcagaggctcgtaatcgctgtcatcggtagaaagcactccctgatcatacagtatcgtgcagacctgtctgccggatatagtgtctgactgaagcatatatttatacagcagtttgctgaaggcggtatcctttgccagagcttcctccagatatgcagccagcgcatgatacacttcgctggaatccaggtaggcgccttcggtagaaattttggaaatgtcaatccagttctgacttgccgcataagtaaggtattcctgcaggctgatcgattcatcggtggtccaggcgatgtaggtggcgtcggtcttgtctatggcgtcctcagacaggatccctgtttttgtcatcaacagctcattgacaatgtagctgatgtattcctgcatctctttatccagatccttgtaggctgccggagcctccccggtcagttcctggcggatggattcaaagacagctgcctgcttttcctcaaaacgggcatagagttcctgttctgtctcggaggccccctcctctgtgaaatgcccgatgtctattacgctgttattgatcagtgcaaagtagacatcatagataggaatggggatggttgccgtgtcatctacattggtgcggtcaaaatcctttatattctgaatcatggaagagacaattcctgctatgtgctgttccagtactttataagcagcaatctgcagttctttgtcaatggtgagatacacatcattgccggactgcggctctaccacagagtcatcgtctgtcttcagaacctttcccagattatccacataaacctttctggagccgttgatgccctgaagataggtctccatatactgttcaatcccggtttttccgataattgatgtgctgttataattatcgctctccttcttcagctcgtccagctcttcggtagaagccttgccggtataacctatgataggcgcaaagtaaatactgtcttcatacgcacggatagtgtcctgagctatgtcaatcccctgcagcctgtctttattttccataattatggccaccgtattttcattcacgttactggcaatagtaaccggaacatatctccggaaactattggtagaaagcgcgtagcgtattgtcactatatccagcgtctcctgtggggtaaagctttcaggcagggagaactttgccagctcctcagaagtatagggcttcttggcgtctgtcagagcaaaccgttcattgccggagagatacgccataatctcattgggagtagcctcttcctctgtttctttcaggtcgtcaatggaagcatgaccgtacacatcggcgcgaaaccgctggagggaggttcctgtgacatcaaaggcatattctccgttttcatctaatataatatggaaatcatggtcaatggaattctcattcgcatgcagaatctgaagtacttcataagccacactgttcagggtaagatttttctcccgggtgctgtcatatgttccgttgtcttccagggtaatggaataggaaagcttattcgatgccagaacgttgccgtttcggtcatagatattgccccgggtggcattcaaagtcagctctttggtagttctcaggttaaagttttctgcatattcctgtccgctcagaatctgcagctgaaacagccgctgaatcaggatacagaacataccggcaaagacaatcatcaggacggttgttctgtggacagatagttttttcagaaagttttttattttcttaaccaagttgaatctctctctttcatttccagttccactaatttgtggttgattttgtacaggatacggtagaataccaaagtgattaaaatggtatataccatttccggtatcataattcgtctcagatagtaaaaaaagtcaatgcgtccccgcagcagaaactgcaggcagtagaccatgagattatagccgatatcacagacggctattaatatcattggtaccttgatatcttcatcgtaataaattttgtaacaaaatcctgtaatataaccggccgtcatatagaccaatgcatagaagcccagcaggtttccatagaacatatcgatcatcaggccgcagacaaatcctgtccacagcccggtcttttttcctctcataaatccgaacgaaacggtaagaatcaaaagaagattgggggcaatagagccgatagaaagactttggaaaaccgtagattgtagaataaagctgacaatgatcagcagcaatattacgattcttcgtctcatatcaggactcccctttctgctgtttcagatcggtaatcacaagaacctcctgtatatgtgcaaaatccactgccgggatcaatgttcctgtgtaagtcaggtggttggagtcctcctccagctcactgatatatccgatgagaattccttttaagaacttatcgcttatctgggatgtgacgatcttatctcccacctgaacctttccctcttcatcccgcagctggataaatcccagtttcccggaatccataagctttaaattgccggtaaccgtacaggtatccgacgtcgtcgccacctgggcgctgacattgctggaatcgtcaataatagagcgtaccgttgaccagttggatccagtttccgtgacaattcccacaagaccgccgatggtgattacattcatatcctttttgatcccatcatcgcttcccttattaattacaaaggtatcgtaccagtttcccggatctttggatattacctcagcagctactttatcatattctgcgtactgctggtccagatcatagagcttctgcagccgctccagctcatactggttctggatcagctgactgttttctgtggtgagttcttctaccttttcctgaagctttttattctcttttaccagcctgctctttttctgaaagccgtcctgtactccggacagcagattccccacctcattgagtccgttctggaagggaacaatgatatatccggccactctttttacggggccggtgggaagttttgctgtaaaggtaagaagcatcagactgatacataccagtgacatgataacaattaaatgtttgctttttattttaatattgcgtttcttcttcatgctaaaacctctattattattttgcccatttctgtaaagagcggctgttaatgatctccttgactccgcagatggtgcacagatcataaaggcccgaaagatggattttataaccggtcactcttcgcaggtaccactcaatgtccggaatccgggtagtccctcctgtgaggtaaatcccctcttctattatggaatgatagatctgaggaggtgtgcgttccagaaaaaatttgatctcttcccccaccgtccggatcagatccgtaattgcctcgtgcacggccctggatgagattactccttctctgggaagtccggaaagactgtctatgcctacaatcttgcgggcctctttcttatccagacccagataccccagggacagcttcagacgcttcgcagttcttgtgccaatatgtaggttatatttgcggcgcactgtgttgcagatggattcattcagctgtttgccgcctatctctacaatcttgcttaaaataacccgaccttctgccaccacagaaatctctgtactctgggcaccgatattgacaaccatagatcctttcgtgtgattcagggggattccgagagcaatggcatctgctatggatttttctaccatacgcacattgtttttccggctgccgctggcaatggtatagtaggctcttttttcgatttcagacatgtctgcaggaactgtaagaaaaagagtattgcccagcaaagaggcgtgttctgccctttgcagcagtgtctgcagtacgatttctgtgtgatttatattagcgattttaccgaaagacatgggagactctacatagatgttggaaggcgctttttcatacatttcataagcgtcatctcccacagccagtacttgttccccgtttcgaatcgcaatcatgttcttttctttcgttatagtgtctttctgggcggaatagatcttaatcgtgcttgtccccagatctacgccaaaagttttatgaattggcataccatacttcccttctagtattttttaaggatatcccgttcacaaaagcttatatactggcagtccccgattataatatgatctaaaaggtgaatgccaatgatttctcccgctccccttactttttctgtcagtaaaatatcgtcctcactgggcgttggatcaccgcttggatgattgtggattaaaataatattgacagcatgaaatttaagtgctgccaaaaataattctctgggagacaccagcgaagcgttgactgtcccctttgatataatttcttcacccaacagatgatttttggtatccaacatcatacacaccatgagttcctgttcttcgtgacgcagctgttccatataatagtctgcaatcgtactgggtgtacggaaggaaagtccccttttggccgccgcactggcaatacgttttgaaagctcccctatacatttaatctgcagtgccttcacggggccaacccctttgagatccatcagttcttcatgagacagctgatggattcctaagagaccctctttatcttttgatagacttaatatcttagttgctagtgatatagatgagattccctgtgagccggttcggatgagaattgccaagagctctgcatccgtaagagcggcagggcctaggcgcctgcacttttcataaggcctgtccatagggggaatcccttgtattcctgttgcttcctgcatagttcctccttacactctcttcaagtaaatgtccggaaggaaactgcctgctttaaagcaaattttattgtatcacagatcaaaaacaatgtatacgccttactctaaatttctgaattttttaataatcgcctcacccaccttcagcccgtccatagcagctgaagtgattccgccggcatatccggcgccctccccacagggataaattccacggatattactcataaattcttcgtttctgttgatgcgtaccggggaggaggttcggctttccactccgcttaaaagtgcatccggccgtgaaaatcccggtatcttccgttcaaaagccaaaattcctgattccagagcactgctgatgcaggctggaaagatgtctctcagatttccaaatgtccacgctccttttatctgcggctctatatcccccaaacagctgctggtcctggaatttttgaaatccccaaacagctgcaccggaattttcccctgccccagagagtaggctgcagactctaagtttctctgaaatgcaacacctgccagaggatgagaatcccggtaatcctccggggtaactgtgacaatcattgcgctgttggcatttctgccgtctctggcgtgatagctcataccgttcaccgccagatgattttcctccgaggatgcattcacaacatagcctccgggacacatacagaagctgtagactcccctgcctgcggagagctgatgggtcactttatagcttgcggcaccaagacaggggttcagctctgtcccatagagggctttatttatcattgcctgaggatgttctatgcgcacccccacggcaaaggacttagcgttcatctgcaatccgtgctcgtacagcatggaaaacgtgtcccttgcactgtgtcctacagcaagaaccagcacctctgccggtatccattcttcgtaattcacctctatttccgtaagacagccgccctctgcggaaaaaccggtcagctgggaggaaaaacgaaattctccccccatatcctcaatcattcttcggatattctgtactatagtaatcagaagatccgtacccagatggggtttttggagataaaggatttcgctgggagcgcctgcctccacaaacagttccagcaccttctgatttcttcccaggggatccttcaccagcgtattcagctttccgtcggaaaaggttcccgcaccgccttccccaaactgtacgttggactgtgtatccagatttcccgtgttccagaaagccgttaccttttccaggcgtctggcagcctcctctccccgttccagaatcaaaggacggtatccatgctttgccagaagatatccgcagtaaagtcccgcaggtccgctgcctgcgattaccggtcggttcctgagaggaagggtaccactggggggtaccgcataccggattctgttggttaacgtaatatttttattgtcaaccttttgaagaattttatgttctttttttactttaacatcaatggtatatacatactgcagctgctccttttttctggcatccaaagactgcttccggattgtataagaaaggatctgatccgaactgatttttaacagctttgcggctttttttaacagctcctgctcagtatgagggacaggaagcttcagctgacgtatctctatcatgtactctcctttctcagcccttcggctgctgctcttcctgccagggcaccgctggtccaggcccactgaagattatatccgccgcaggcaccgtctacgtctgcaagctcgccgcagatataaagtccgggatactcttttgcttccatgctttcgggatgcagctgactggtatctactccgccggaacagacctgcgcctgctccagggaagcagcgccggttggaagaagaagatactccttaatacgcgaaaccaattcctccaaatccggtgagccgtccatgagaacttcaataagctttctgggaaacagaccggtaagggattccttcagcgtcttatacggacagtcctcctgccgttttctgagaaagctctccagctgcttttttgaaaaatcagggaagaaatccaaaagaagttccggggtctgtccttcctgcaagagccggaccgcatatcggctcagctgaaaaacagggatgccggagacgccgtaatcggtcagctgaagctcccctgtctcactgagaaaattctctcccttgactcttaaaactacccggccctccacgcgcaccccggaccatctggaaaataatttccggtacgcagaagatttggccctgcagcgcaggggaaccagggcgggaagaggaggtatcagacgcagtcccagcttttccgccagagagtaacctctgccgtcagccccttctatccccgaagcgcttgaaccacacgccagtatcaccttgctgcatggatagctccagccgtccgttaccaccagatatccgtcctcagccggaaggacagcagttacgttttccctggttttacacttcactttcagatacctggcttccatctccagcacctccaggacgctggaggcctgaaggcttgccggatagatccagccatttttattctttgtgtagatacccagctgtgagaaaaaccgaatcgtatctcccactgaaaaatgagataacgccagttcggcaaattccgggtgggatcctctgtaagctctgggattttgatggatattggtcatattgcacctgccgttaccagtggccagaagctttttccccagcctgtcgttatgctccaggagagtaacctttgctcccttgcgggcagccgtaacagccgccatcaaaccggatgctcctccccctataacaacaacggacggctccgcatgcatgcttttgctcaacgtgttttctcctttcttcgggctttcatacgaaagaatctaggacaggttctcaggcagtgagactacacctgcctcaagaagcttttgaactgacattagaatccccaattttgcgtgctgccaggtgagtcctccctggaaatagacggagtacggaggctttatgggaccgtccgcactgagttctatagaagaaccctgcacaaatgccccggcagccattatcacatcgctgtcgtagccgggcatggcccagggttccggatccacatagctgtccaccggtgcagctgcctggattcctttgcagaaaccgatgactccctccggcttatgaaaagtaattgcctggataatatcatggcggctttccctgccgtttggaaggacctcaaaccccagctgctcgtaaaggtttgccgcaaacactgcccctttcagggcgcctgccacaacagtaggggcaagaaaaaaaccctgataaaagggctggtttacccccagtgtagcccccacttcctttccgagtccgggagaggtgaggcggtaggccgcattctccacatattctgcttttcctgcaatatacccaccgataggagcaagtccccctcccggattcttgatcagggaacccacaatcagatccgcccccacatcagagggttctattgtttccacaaattctccgtagcagttgtctaccatacaaataatatccggttttatcgattttataaaagcaattagttctccgattgcattcactgagaaggaagggcgggtctggtatcctttggagcgctgaatggtggcaagctttgttctgctgtttatggcagcccggatagcttcataatcaaagcttccgtccggaagaagctctgtctgccggtagctgaccccgtattcggccaaagaccctttggaagggcgaatcccaatcacctcttccagcgtgtcatacggctttcccacaggagataaaagttcatccccgggccgcagattgccggagagagccactgccagagcatgggtgccgcaggcaatctgcgggcgcaccaaagccgattccgtgtgaaaggtatctgcgtaaacagactccagggtatctcttcccagatcattatacccgtatccgctggatgcatagaggcaggcctcgctgacccggtttttctgcatggcgtatattactttcatctgattatactctgctacctcgtctatgcctgcgaaccgttcccttaagagcgcttccgtcctctgtccgaacatccggactttcccggatattcccagtttttcatatatttcatctatttcctgtctcatgttttttccaaattcctttctcttcgcatacggaaagcatatactccagtatcttatcctctcttccgtcaaatgcttccttttccagccatattacgtcccgctcccgccgaaaccaggtaagctgccgcttggcaaaatgcctggtatcccgtttcagtgtatagacagcctcctcaaggctgcatgtgccgtccaggtatgacagaagctctttgtaacccagcccctgcatggagaccatatctttcgtatatcccatacggtggagcgctttcacttcctccagaagcccccgttccatcatctgatcgatccgttgttctattttttcataaaggcggcctctctcttcgttcaggacaaaataggcatattgataaggtgactccttctgccgttcctgttcattgtgggccgatatgggcctgccggtcttctcgtagtattccagcgcacgaataacacgctttctgttgttgggatgtatagaagccccggaaaccgggtctgcctggcacaggcagctgtgaaggtattcatttccccgctcgttggccagggcttccagtctgcggcggcaggcggtatcgtcatcgttctccgcaaagtctatccccttcactacagactggatgtaaaatccagttcccccggtaagaacaggcagtcttccccttgcgtagatatcctccatggcttctaacgccatcgtctgaaatcttactacattaaaatcctcggagggctccagcacatcaatgagatgatggggaactccctccatctcatccggatgtatcttggcagatccgatatccatatacctgtaaacctgcatagaatctgcagatataatttctccatttacagctttcgccagtgagagggaaagcttcgtctttcccacggctgtggggcctgtgagaacaatcagcggtttcttcaatcttttcacctacacgattcgtttaaatttcttttccagttcatatttggtcatggcaataatcgtcggccttccatgaggacagtgatacggattatccagggtcaaaagttcctcaatgagccgatctgcctcgctgcaggataatgtctggtttccttttacagcagctttgcaagccatagttgccagccggtgggtcagaagttccagggaggaacgcttggtgtctccctccagatggtctaaaagttccagaaagagttctgtatctgccacaccgtaaagattcgacggaacagcccggatactgtagcctctccccccaaaggattcaatctcaaaaccaaaggaagtgaaaacctccatattagcccgcaaaagttcctcttcctggatgctcagctctatgataagaggcggactcaggtactgggaatgtatctccttattctgcaaatccttcataatgcgctcatacagcactttttcgtgagcggcatgctgatcaataatatagaatttgttgtcatactctaccagccagtacgtatcaaataactgaccgatgatacggtgccgggacctggcagacggggacagcagcttttcctcaaataattccagctgtccgggagctgcttcgtggtctttcttccccgcctcttctatttctgcggtttcccgggatttcccggcatcctccccgtcagtctgaagaggcacagatatctccggctgtggtgtctgttcccggaataccttctggctttcctctgtgttccctgtctgagggcggacagctgagtattccgtgttctcccggatgtgctccgaaggatgcactgtatttgctgtattcccggacggctgcaccgccgtttggactgccatccgctgtttttcaaagggttccggaatggttctcttgggaggaggcaattcctttttctctctggaacggtcaaaactcacctccggaataagctccttatgcgtcagttgctcaagcagcgcctgatatacagcctgatacacctcctgcccgctgctgaagcggacctccatcttcgtgggatgtacattaacatccagttcttcgccttccatagtcaaatgaagagagacaaacggatatttatgctgcatgagaaatggcttataggcgtcttctattgctttcattataatcttacttttcacatagcggccgttgacatagtaattttcaaaattcctgtttcctctggagacagagggcttgcccatatacccctgaatggcaaggccgttcctctcatgacgaatctccataagctccctggtaatgtctctcccgtagatgtgataaatcacatcttttagattattatttcctgaagtgtgtaattttgtctgtccgttactaatatacttaaaagagatgtcactgtgggacaaagccagctgttccataaagctgctgacataattggcttctgtcacagggcttttcaggaatttggcccgcacgggagtgttgaagaaaagattgcgcactaaaaaggtggttccgttgggcgccccgatctcttccagcgttttttcctctcccccctcaatgacataccgggttcccgtcagctcccggacggttttggtaattaactcaacctgtgagacagcagcaatgctggacagagcctcaccccggaaccccagggaggatatgtgggtcaaatcctctgccgacgcaatcttactggtggcatgacgcagaaaagcaaggggcacctgttctttttccatacccgctccattgtctgtgattcggataaaagagatacccccttcttttatttccacagttacggcggtggcccctgcatcaatggcattttccaccagctccttaactaccgaggcaggacgctccacgacctccccggcagcaattttgtcaatcgtacttttgtccagtactgctatttttctcaaagtatcaccaccgattctttaatttagtctgcagccggtagatggtattcagagcatcaatcggcgtcaggtttccaacatctatgttcttcaattcttccagaatatcattgtcctgtaccgtatccagaagagagatttgatccagctccatctggtcataggtaacctgtgcttttttcctggagcctctggtcagggcagagtccgctgcaatctccttgaccgcagaagttatatccgcatcgctgagctcttctaccagttcctttgcccgctcaatcacagtttcgggaacgcccgcaagctttgctacctgaatgccgtagcttttgtctgcgcccccctttacaatcttgcggaggaatacaatatcgtcccccttctcttttacagcaatgcagtaattgttgaccccggaaagctttccttccagctccgttaattcatggtaatgggtggcaaatagtgtctttgcccccagaagcttcgggttgctgatatgttcaatcacagcccatgcaatgctgagaccgtcaaaggtgctggtgccccgtccgatttcatccagaatcaacaggcttttgggcgttgcatttctcagtatattggcgacctctgtcatctcaaccatgaatgtgctctgtccgcttgccagatcgtcggaagctcccactctagtaaagatgcggtccacaattcctatattggcttcttttgcaggaacaaagcagcccacctgtgccatgagcacgatcaaggccgtctgccgcatatacgtagattttcctgccatgttgggacctgtgatcacggacactctgttcttattattatccagatacgtgtcattgggaataaacatatcattggagatcattttctccaccaccggatggcgccctcccttgatgtctacaactcccttggtattaatctttggccttatatactggttcctctgagccaccacagaaagggaggaaaaaacatccagacgcgcaatggccttggctgtcttctgaatccgcagcacttcttttgcgatagtttcccgaacctgggcaaacagctcatactccagagcgaataacttatcttccgcacctaaaatcgtatcttccagctctttcagctccggtgtgataaagcgttccgcatttgtcagtgtctgctttcttgtataagaatcgggtaccatggagaggaaagaatttgtcacttccaggtaatatccgaagactttattatattttaccttgagattcttgataccggtgctctcccgctcctttgtctccagctctgccagcatactttttccttccgtctttgcacggcggaacttgtctacctcttcgttatacccttcttttataattcccccctctttcatggccaaaggaggttcctccataatagcacggtcgatgagctgaaagagatcctggagatcgtccatttcctctctgacagaaaccagctccccacaggagaactctcctaaaagctgcctgatataagggagcatctgaagagaggacttaaacgctatgagatccctggggttagctgactgatagctgacacggcttaccagacgctccagatcgtaaacaggtccaaggtattcccgtatttcctcacgggagatagccttctcgttcagctcctcaatggcgtccaggcgccggttgatggattcttcctcaatcagaggctgttctacgaagctgcggagcattctggctcccatagcggtttttgtcttatccagtacccagaggagagaacctcttttctgcttttcccggagtgtttctaccagctccaggtttctccggctggaactgtctatgagcataaagcagtctgtaatatagggggatatagtagtcatgtgggaaagtgaagtcttctgggtctctgtgagatactgaaacagagcgccagccgcaattacaccgcagtcgtaatcctttaaccccagcccttccagagtttttactcgaaaatgctccagcagggcccgtctgcacagttcgtcgtcaaaataccagttatccagggaatatacggtaattcccaggcggttccgcatatcctgtatatcaatcccgcacatataaaatggttcgttgcagatgatttctgccggggaaaacttattgatctcatccaaaagctttcgtgatttatttacctctgtgagaaagcaatcccctgtagtgacatccgccacggcaattccaaagatttcgtcaatgtagaccagggacatgatatagttgttctttgtctcatccagggcctgggtattcagagtcgtaccgggtgtgactacccgcaccacttccctctttaccatacccttcgcctgcctggggtcctccacctgttcacagattgccgctttatatcccttttcaatgagacggtttatatacgtctccgcagcatgaaaaggaactccgcacatgggagcccgctcttccattccgcagtctttacctgtcagggtaagttccagttctctggaaaccgtcagtgcatcgtcaaagaacatctcataaaagtcacccagacggtaaaataagatacaatccggatattcatcctttgtcattaaatagtgttgcatcattggtgataatttatctctgtttatttccattcgttttatccttcgttttttattgctgtccccatatagtaaaaacctttgcactcatccagagaaaccttgaataattttcctgtcatagaggcatcccccggaaaatgtaccagcagattatttcccagccgccccgtcaccagagaattgtcatgttcatttacttcttcaactaaaacctcctgtacagttccggtcagccgtgacgaggtttcccgcgagatttcctgcacttctttcagcaaacggtcgaaacgctccttgactacctcttccggaacctgatcctccatagcagccgcaggagttcccgttcttttggaatagataaaagtgaaggcactgtcatacctcacctttctgataacatccagcgtttccaggaaatcttcctctgtctcctggggaaagcccacgataatgtctgtggtcagagatatattgggaacggccgctctgattttatcaactaattgaaggtatctctcttttgtataatgccggttcatcttttccagaatccggctgctgccggactggagcggcagatggagatgaggacaaatttttttgctctctttcataacctggatcaattcgtctgagagatcctttggatgagaggtcataaaacgaatccgctcaattccctcaaccttttcaatctcccggagaagtgcggcaaaagtcatgggagtatccagtgtcttgccgtaggaattcacattctgccccaaaagcataatctctaccacaccgtctgcagcgagtgcttcgatttcccgtataatatctcttgggttcctgcttcgctcacgtccccggacataaggtactatgcagtagctgcagaagttgttgcagccgaacatgatattgacccctgatttgaaggggtattttctctcactgggcagatcttctacaatctgatccgtatccttccagatatcaatcaccattcgtttggaatccagagccgtggcaatcaattccggaaatttgtaaatattatgggttccgaaaataagatccacaaaggaatagctcttcttcaatttttcaaccacatggggttcctgcatcatacagccgcagagggcgatcatcatatgaggattcttttttttcagactgtggaggtaacccagacggccatagactctctgattggcattctcccggacggtacaggtattgtatatgacgaaatcagcctgctccgaagctgcctcctgatagccgatttcctccagaactcccacaagcttttcggaatccctggcattcatctgacagccaaaggtattcacgcaaaaagtcagggggcgccccagctttttggaagcatccccgattttctttttcgctgccgccatataataatactgcctgagaggttcttccaggggggcttcccctgtaatatctattgtatccatagaaatatttgacataataatttcctttctttcgtgttcatcagcaattataccaaccatatcttgtattttcaagacattttcaaaaccgcaagaggaatggaacggatttcggcataggtctccgcctgataatccaccgacaggggaaaggacgcctcatccggtacagtctcaatggtgattgcgggcttctgaaaagtctcagaatagtaatttacagagtttcccccgctgattacagataggaactcttcttcctttttgccaagcgcgtaatggcagattttctgcagctggcgggccatgcgaaagcttttctggttgtacagaaaaggcatagcatttctgtagtagtaaatcagtcttcccctggaatgaaaatccagataggccacggtctcatagctgtgaaaaagttctatgagagctttcgtctcgttttcactcccgggataatcttcaggctgctgctgaacataggatttgcaggggaagtttctgttaatgtctacgctcctggcgttatatttccacacactccagtcaatctctttcatccgcatgctgtgccgcagcaccggatggcggataccggaaaatccctgaagggctgtttcatagccatccggattcaccaggggtacaaaacatatagaataggtattacagagtttatgtacatcatagatatcgtataataaggtacgcttctcataggcctcactgtactcttcaatcatgcggaccaaaactgccggattcgcactttctctgccgtgaacgccggcggtacatataagaacctgttctcccaggcccagccgtatcatgggtatcgggcggttgtcatgactgagtcctatattccggaagataagaaaatctgagtaggcggcagccagaagttccatagcatcgtacagttcgtcatatgtatagtgcttgtctaaagaaatcataaaaagcctcctctgcatactttagcgtacggcatctgccgtgcgccggtccgcagaacatgtaagtaatgtcctcggacaaatgtttccactaaagtatatgaagaggaggtttcttttatgacacctatggacggatctgtccgtttccatagatgatatatttagttgtggtcagtgccaaaagtcccatgggacctctggcatggagtttctgtgtgctgatgccaatctcagctccataaccgaactcaaatccatctgtaaaacgagtggaggcattcacatacaccgccgctgcatctatttcatccaggaatttctgggcgtgagcataatcctttgtaatgatagcctccgaatgtttggtattatactggtttatatgggcaatggcctcatctagggagtccacaatctttacggacagaatataatccagatattccctgccccagtcgtccggttgggcaggcacggcgctgggcagaagggagagcgcccgttcatcggcgcgcagttcaacctcatgtgtccgggacaggcgggatgccagaagaggcagaaaggcttccgcagccctgcagtgcaccaggagggattcacaggcattgcagacaccaactctctgggtctttgcattcgtgacaatttccgccgccatagcgagatctgcagactcatctacataaatatgacagttcccggtacctgtctcaattacaggaatggtgctttcatttaccacggtgcggatcagccccgcacctccccggggaatcagtacatccacatattgattcagcttcatgaaggctgccgctgtctctctggaagtgtctgtaatcagagatatcgcatccgaagtgaccccgcaggcctccaggcttctgcggatacaggctacaatagcctgattggattctatggcatcacttccgcccttgagtatagctgcattgccggttttgaagcaaagtccgaaggcatctgccgtaacgttaggtcttgcctcatagataatgcccacaactcccagagggactcttttttgtccgataagcagaccgttgggacgctttttcattcccagtacttcccccacagggtcttccagctctgccagctggtacagaccctcagccattccctgaatccgctccccggtcagtgtcagacgatccaggaggccttccggcatccccttttcttttcccctggccacgtcagccccattggctttcaggatagtatctgtatatgtacgcagatcgtcagctgcttttacaagcactttgtttttaaccgatgtctccaggctgcgcagtatggtttctgcgtccttggcttttcttcctatctgttccaacattgcgttcgccatagttatttccccctgcttactgctattctataatctctttttccgtcaccagtttatccggaaggatatccgtttcttcgtaaggtgcctcgggcaccagctgaaaatcaaacgccactgctacggtgggatggtttctgtgcctgctgaggtaccggtcatagaatccctgtccgtaccccacccggtggcgcgcccgatcaaaagcaactcccgggacaatcatcagagcgtcctcccactccacggtttcccctctggctggttccggaatctgaaaataccctggttccagctgttcaaaggaatccagccggtaaaaaatcatatccttgccgtgtactttgggaacggccacctttttccccaattcccaggcacgggtaataagctcttttgtggaaacctcgtgattgtagtctgcataggcatagatacaggaggctttttcaaattcatggagctgaaacagcttctccataatcaaatggctgtctgccagtacctgctcctctgtcgcttcacttctcttcttaaatatctcttttctaatgaccttttttgcttccatacttttcccccagattaacgacgcttccgtctttttctaccaaatcaatcgtatcaagctgagatctgagattcatccgcaccagtgcgatgtactcctgacgaagctttgcctgttcttccctctcagcatccgtgaggccttcgcctttggctttccgtgccagttcattgattcggtttagtttcattggatccatagtttactgtgttctccttttacaataatttttctatatagtctatcagataaaattcttctttggcattggccagaaataaggtgccgtgattgcggcctgacattatcttgtgaataatgtggaagtcctttccgttggcaatcaccatatccgctcctgcactggttgctattgtagcagcggaaagcttcgtggccatccctccggtgcccacattgcttccggtactggatttgcccatgtccaataaggtatcatcaatggtctcaaccacctcaataaaacgtgcatccgggtttgtattgggatcatcggtgaataaaccgtcaatatctgagagcaaaatcagaagatccgctccgatcagagccgcaactacggcagacagattgtcattgtctccgaattcaatttcataggttgagatggtatcattctcgttgacaatagggattgcccccatgtgaaggagttccttaaaggtattcttggcattctggcggttcaggttgttcaccatggtgttttttgtcattagcacctgggccgcggtttggttatactcagaaaagagcttctgatagatcatcatcagacgggcctgtccaattgctgcacatgcctgcttttctgatacggaattcggctttctgtcaatgcccataacacggcttcccacagcgattgctccggaagagaccagtacaatatcctttccctgattgtgaagatcgcttaattcccttaccaaaatctccatctttgtgagattcagtctccccgtctctgcatgagtcagagaggaggaacctatcttaatcacaattctctttttatcttttaaacgttcacgtatattcatggcttttctccctgtaaaatcatatcgctcttatattacaacatttttttctgttcgtccagaggagcgcggtctagaccagagtacagggagtacctggggttcagctggagtaattctccagaaaactgtatagttcatccactgtggggatggtttttccttctttgatttctgcctggagttcttccgggaggctgtctgtggctatgtctgtatattcgtaaaccgtctcgccgtcctccagatataccgttacggaattatccgtatcttttataagaaaattcttctcttcctcctgactttgtcttaaaacaatatggtcagaggaatagcttaccacctgaaactgctgctgatccagttttcctgtggctgcatcgtagatttcaaaagtatacagtgcatcctttctgggaaagctcccggacgcatctgtctcctgggcattcagcctgtccacagtgcggttcaggacagtcagcctgtctttgagagaactgacctgataatttgtataaaatcctgcactaagaaagaatacggcaataaaaatgccgatactatagtatgctttacgcatgagatatcactcctttttgactatagtatcgaccagattttgctaattattcagccgcgtctattctgcatccagattctcgtccacctctgaaggagcgggctgctctgtgctggttccgtcattgatttctacgttggcagcttctgtatcctgtacaatacatacccatgtttttcccgtattcagcgtaatttcgtttccggatgcgtcataataacgggtaggcccccattcattgccgtttttcgtccaggtaacatctatggcctgcccattggtaatatatttgccgctgcctccggataaggtatccacattcagataagaaccatccgggtaatactcccagggagaatactcaataagaatatttttgtaggctaattgttccccggtcagctcatcaatctgcggctctccatactggaaacggtaataaagtccgtcatcctgatgatattcaaaccagggatcattgactttgtagtgaagtctcacataggacgccggcgttccgttatccaaagaaaccgtctcccccaccttggcaaactggtaatgtcctgtgtagtcagaagaatactcctgtgtatatccgttaatctcaatccctttttgaaggccttcaaaacttgtataggcattgtgaggcgcttttctgtcttttgtcctgtaatacacctggctcccgtaaccggaaagtccgcttaaattgttgacattctccaggtccagatacggcagagcatacgctgcctgaccatagtgggcataaatggcatcaaattccagggcgtaatatatataataatcccggcagcttctgacagagcctattttggtaaggttgtcgtagtcctcgaagatccccatcagacgggtaattccaccctctacaggcgcctcgtacacaactcctgcgttggctattcctgcctggggaactgcttttttgatgttattgagcattacggcaaccggacgccttgtaccgatcgcttctgaaacgtattctccggtcaggtagctctttaccataccgtctggaatctgttccttgtcaggtacttctgcttcaacaatttcttccggctcctcctcctgtacaggttcttcttcctttacttccggttccttcggctcttccttcttgccgcatccaaacagcactgctgacgcaagaacacaggccaaaaccaccttataacgcttcatgtgacttcctccatttatcttttgatttgtaaaccggacaggattgcttcctgcttttcttccattacagcggcttccccgggtgtcatatgatcatatcccagaaggtgcagcatactgtgagcagtcagaaaggcaaactcccgaagctgggtatgtccgtaggcctctgcctgctccttcatgcggggaacagatatcatgatatctcccagcataagctcccccgtgtcgggattaaagcagtcatctcccatagtttcaattataccatagtctgccggagatgaaaatgggatcatgggaaaagacagaacatctgtctccttatccattcctctgaactcccgatttacccggcgaatttcctctgcaccggtgagaaccaggctgatttccgcctcatagggacacgcttcccgatcaagagccgcatctgccacctgcctggcaattgtctcaaaatcaaaagaaatttcctgttcatattcattttctattgtaagtgtcatacgcttatcctctgtcctttatctctcccgttccctgcgggtgttcttttgtggtttctgccttttctcataggtatcataggcctgtacaatcttctgtaccagcggatggcgaaccacatccttgctggttaactgggaaaatgaaataccctcaacctttttcagtacctgcagcgccacatccagtcctgaacgggctccgctggggagatccttctgggagagatctcctgtgacaattactttcgacccaaatccaatacgggtcaaaaacatcttcatctgcgcaggcgtggtattctgtgcttcgtccagaattataaaggcattgtccagggttcgcccccgcatatatgccagaggagccacttcaatcaaccctttttccatattcttggcaaagctttccgcccccataatctgatacagagcatcgtagagggggcgcagataaggatctaccttgctctgcagatctcccggcaaaaaacccagcttctccccggcttcgatggccggccgggtaagaatgatgcggctcacttcattgttccggaaggctgtaatagccatggccatggccagatatgtcttgccggtacctgcaggacccagtccgaatacaatcatattcttccgaatctgatccacatactgtttctgccccaaggtcttaggcttgatagggcgtccgtttatggtatggcagatacagtctctgtcgatctctacaacattctgctccttctcctcaaaagaaagagataaggtatagtttacctgttgttccgtaatagtattccctctcctggaaagctctgtgagctgctcgaatacctttttcgcctgtctggtattctgttcctttccaagaatcttaagattgccgtcccttgagataacggttacattcagggtcttttctatcttttttacatactcatcaaattgtccgaatacgtttctttcatggtcgatgggtatttccatcagggtttcaacgatattactcatccgtctctgctgtcctttcttctgcttccggaggcgccaccacttctgtgggagcttcctttcctatcttttctatcacttcgatggatcctttcgaaatacaggaagtggaatttatctctattttaacacgattgtcacaaatttctacccctttttcagataatttatccagaaaagaggtaagcttcctctgggccttcttggtggcttctgccttggtataggttaaggtttccggcgtatattcatagtccgtaatggttccgtaactgatggggaggtaaaaattttccgtaagcttcactctgtccgtggatgatacgctgtggtaatccgtaaacggggcacgccctttggtagaaaaataagtgtccataatctgcagtatatagtgcttttttgtctttcctgtataaacccttttatcgtaggacagcggaaactcctggtaatactggtactgcgtccgcacatagatatcggcatcggaatgcacatactctctctgggccgtctctccgctgtcatcttttatatccagccgtcccaatacaagaatatctccttctttgcacacatccccttttgccatctggggagttccctgccgggttaccattgagacgatggttcctcccttttcagccacaaggtcacagggagaggtgtctgccgcctcttcctccacataccggtctgtattttcctgcacatggagaatcagccgtgtcccctgtatcttggtagacacccagataatatccggaaattcctttcgtatctgggctgatatccaggcgcagtcaagttttcttttggcaattccgtgatggacatccagctcatcgagatagaggagaatggactgggtactgttggacaggttcccatccacatgtatattccagatatataaagacatactgtaaagcaggaacaggcagagagcaatcccaataaaaaaggcctttctctttttgtttttgtaaaaaaagaaaggcagtccatattttcccttaatcatgattctggtctttgtttttttgcaaagcggctttagctgataaaagccctgaatcgttatattcatttcatagtaattctccacatgagtcagatcccagatgggaatattatgattggcacacagatttaaaaagcgttccggttccttgctcatcaatcggatatgcagataaccctttccgtaatatttccattttttcaaatatcatacctccgtttattcgtgatatacgtgaagaatacaaccctgtatcttcatttcttcgctggtataatactctattttcaggtttcttccctccacccggattttccctttttttgtctgaaccaggatcccccagtcttcatattccaaaatgcttttataattttctatgtatagctctgaacttcccacaatagtaaccaccacatcgcggtaagccaagtcccttggaatctgcagagtgttcactatgtcgccggctaattttttaggcttcttatgcttcacaaaaagcctcccttgtggttattattctctaatatatgtatcctccaggaaaataattccaaaccaaaggatttgattgtagccgatggtgtaatccatctcaaaacgctctgccagctcggtcaccacgattccatggctctccacacaggggtgcatctgctccggaaaacggcaggggctgtcgggataggcacactcgtcacagatgtcacaggattctgtggacagtgccatgcagtggattccctggcctttgataaaggcttctatccgggcaacaatatcctcgtgttccctcctggtgcccagagtttcctccatattcataatatcagagacctcagccactgtggaaaagaaaaaacactgaggataggacaagcaccgctcccggcactcttccagagtacctacaccgggagggcaggcccaggtagttccatatcgctggcattcctgctggcatatcgtccggattctgggagaaaatgccagctcctctgtggggataaacacgtattgatagatgggaaactgactgataaaagtctcaaatgcttccatattcattgtataagaatctccttccattttaccttaaggctattgtatctgaattgtcataaaactgcaagaaccggtagctctgagacttctcctgtggtaaaataatggtactgttcacatgtcactgtcccgcgggttgctttgcacagtaaaatacacttactactattacagctttggaggaatagataatggaaattcactggacaatgctctttgctctggaagccgcaggcacgattgcctttgcctcttccggcgccatggtggctatagaaaagaatctggatcttttggggattattgtacttggagtcataactgcagtaggcggagggatgataagggatattaccattggcaatatccctcccagcctgttccgcaatcccgtatatgtatggatgtccctgatcacagtactcctgctctttctggttatccgttttcatcccagaattatggagggcagataccgctccacttacgaaaaggttatgaatatctttgatgcggtaggtctgggcgcgttcactgtcgtaggcattaacacagccatagaagccggatacggcgactatcggtttctggcggcttttctgggcgttgtcaccggtgtcggagggggaatgctgcgggacattatggcaaaccagacaccctatgtactccggaaacatttctatgcctgtgcttctattatcggcgctgtctgctatatctttttacgggaactcattcccggaaacagtgccatgctgctgtgtgcttttattgtggttataatccgtcttctggcaaccagataccgctggaatttgcccagagcttcaggaaaaagtaaagacagaagataaggtgccgtgtgccaggctgttttctatccgcgctgccagatcccggctcagctgcataaaataccgggacatgccgggggtatctgtcccccgggtgataatcttaatgatacctgccgtctttctctccacctgcttaggcaagtctcccgagaaatagcgttctatctcttcttcgtgcttctcataaagaactggttcatataaagggcagtctgcaagaaaacagccaatggcattgataagcaccagctcacttatatttcccatataaggtgctctgtttcgttcctcctgctgcctcaccagatgttctgttccttcaggggaaaacaaagtaagaaacttctgttccagtaaaaggtttcccagatactcataaaccaaatcgattccctgctgcctgtaatccagaaacagtggcgggtagtccagtgtgagcaggtggtcctggggacaaaaccgggcatcgtacctgagaaaaaactggggcatacccttttgaaccgtgtctctgtaattagcgcatccgtaaaagaagaaattctccatcagcttctcataaagttcctttgtccgccatactttatgaataaccgcctcatagccggcttcataagctgctctggccgtcagttgatgttctgcggccaaagaattgggagaagaatgttccagttcctcgatacagtaaatgaccgcttccatcaggcttcgggcagtttcatagggcacagagctgctctccttgctggtgtatttgtcaatcagatacgaaaccacaggcaacacttcctctgctgtatatgtcatagtactcctttcatgggctatcgccaggccagctccttcagagcctcaagatacagttcactgtcccaccgttcttcctcgctgaacccttcatattcaccgctgccgcctgaagccagatacccatcgtacccatagcgtattgcccgtgcgaaccgctccagacaggtagattccaggtattccaggtctccgaagcagatgttctcaaaggtgtctttcataaattccagcaattcgtcatctgacagtttctccagagactcgttcttaaagcggtaaaagatatcctgaagcctggccagggtgcttccataagtatcggaagtaatgtaggaagagtcgcagaaggtatagataagcttatccaggatcccgccgcccagttccaccctctgataggctttgaggctcttatttctgcactggatcagctcctttgcctcttctgctgaaagagacaggccgaaagactgggtttgcttgttgcagtccagaatcaggcgcgtctcctcttcctgcttctgcacctgccatagggcgaatatattctctgtcacagtatcactcctttctgtaggtggagctaattatacggcccggcaagagggattgcaagacttgaaaaaaagcctgttttgtggtaatataatacttagaaaagaggcagaaccgtatggtttctgcctctcattttgtattcagccctgcagcaaacaattttttcatgccggtgtcacagatttttaaccacttccagaatctcctctggggaccgtccataataccacatcccatcgatcacggcattgggcgctgttctgcagcgcttcagacagttttgcgtcctgagataaatgcttccgtctttggaaacaccattttttccaatctggagctcttttttaagtatggcaaggagttctttcccgccctttctgtggcatcgttctcccgtgcagataaggatttcatgggagtaggggatctctttcagggaaggggagagacgaagcagcactcggataaaggacagcttgactccagcagcctttgctgcacgctcgctcagccagacagggatactgccataggcctcttgaagctcccagagcatttcttttattgtattctgctctcctctgttttccagactgctgtaatactccagaatctcatcaagctgctgttctgtctcatgtttggtttccttcatttttattctcctgtcattgtccggcaaaagccggcaagtactctgtgggatatcatccttcagagatagcttgccctgaattttaaagtatatgccccgggaccgttcgaacaggaaactaggatcagagtattatttttgctttatgggatagcagacctctgtgaccaattcttccggattctgcgtctgtgccggacttacatgatagatgcaaaaagaaggcccgctgatctcatatccgttgtcacacagccatttggcgacagcttcatttacttctgtgattttttcgtagctgccctgataagtggcggatgcaatttcaaaagcatccactgttttgaatttcacatgttcggtatctttataggtcccctttacctgaagctgtatttctacatccacctctccgtcactgaatccttcgtcgtgaaacagggcaaggccgcagcagggctcttcttcctggagattcatggctgcagtctccttgtataaggtattccacaaaatatgttcctgatgatacgcaggtattaccattctcacgcttgctacatatcttttcggcattattttttttgtcacatcataattcatcataagttcatcctttcccagcctcctaatggctgtatcaaggagctgcagacggcgctttgcctcttccgcctgttcctgcacttccagctgctttatctccagatattgcttcagcgcctctggatcatggtaattcttcagcagctctgcgatggcagtaaggccaaatcccatatccttcagtgcggcaatccgtccggccacaggaagctgtgtctcgctgtaatagcgataaccggtaaaagggtccgtactggcaggaattaaaaggcctatctgatcgtaatggcgcagcatccgtatactaatccttgacagttttgaaaaatctcctattttcagcatgtttctacctccacatatatgtgtttttgagctcactgtcagtatagagtataacactatgagagagtcaactggaaataacatcaatgttatcattcgttgatagacattaaatcaaaaaagaactacaatgtaggaaaaatgaaaggcatgataaatatgaaaaatatgattggaaccaatctaaatagattaagaaaactgcatcaatatacccaggaggagattgcggaaatgctctccgtctccagacagtcagtggccaaatgggaatcgggggaatctatgcctgatatgataagctgtgcaaaactggcggaaatattcggagtcacaattgataacctcgttcaccattcggaagaagactccggccttgtgattcccatgaaaggaaaatattttttcggagctgtcacagtgggggagagaggccaaatcgtaatacccaaaaaagccagagaaatctttcatatccacccggaagatcaactcttaatactgggcgatgaagagcggggactgggcattgtccatcagagagagctgatgaaattcgtgggcaggatgggggttgcgtgcagcgatatcacagaggaggaaacatagatgggaaaagtagtatatttttgtattccagcttacggacataccaaccccaccatagcagttgtgcgggagctggtaaaacggggacacgaggtatggtattattcttttgcacctttccgggaaaaaattgaggatacaggagcccattttatcccctgtgatcatgctttgcccgagctgaagtcctccgacgaaaaaaagatcggaaaagattttgctgcccttatcgagatggtcgccgacactactatagctctgaatgaacaagtctgccgggagctcacccatatagctcctgactgtattgtaactgattccctgtgtttctggggaaaattgtttgccaggaagcttgccgttccctgggtgtgctctaccacaacctttgccttcaatgaacatacagccaaactgatgaagggaactctgccggaaaccctgcgcctgctgaccggaatgccccggatcaaccggaaaatctcccagctgcgccggaatggattccccattgagaattttatctccatcatacagaacgacaaccatacagacaccattgtctatacctcaaaagaattccagcccatggcagaactcttttcccaacggtatgcctttgtgggaccttccattgaccatatctccgtccctcccgacagcagaacacgacagcgtgtctatatctccttaggtaccgtgaataacaggaaccggcgattctatcaaaactgtattgaggcgtttcgcaaagaaaatctggacatagtgatgtctgtgggcgaaaaaacagatatctcctctttttaccaggttccggaacacttccatatttttcggagcgtagatcagatccgggttctgcagaataccgatgtctttattacccactgcggcatgaacagcgtaaacgagagtctgtactacggagtccctatggtgctcttcccgcagcaggaggaacagcgccttgtggcagcccaggctgccgctgccggggccggcattcttctgaaacactcccgttctgaagatctgaaaagcgctgtccgggaagtgcttggcaatgaccggttcaaagtctgtgcccaaaaactggcagacagcttctcccgggcaggaggggctgcaaaagcagcagatgccgtatgcgaagtgatgaaccggtcccgttaatcctgtcaccttatatgtactgcttctcttcctccgggtctttttccaggatagaaaaagcaatattcgttgcatgatcggccacacgctccaggccggtcaccagatccgtgaaaataatacccgccatgggagaacaggttcccttcgccatccgccttacatggttctcctgcagctcccgctccatatgatcaatgctgtcctcaagctccagaatatcgggaagattcctgggatccaaagaagtaaacatttccatagacttttccagaatctccatggccttcccgtgcattaccagaatttccttctcccccttctcggtaaatgtaatgccgtcttctctgcattttaccgccgcatctgcaatattttccgcatggtcgccaatccgttcaatatcgctgaccacatgaaacaatcctccgatccgctcagcatctgccaccggcagctgaagctgattgatgcgcaccagataatccgtaatttcccggcttaaaaagtctatctgtttttctgtctcatacacctggcttatcttgtcctcattcccatcaaagaaagcttccatggataggctcagattccccttggtaagggcggccatccgctcaatttcctgtgttgtctctaccacggcagtagacggggaaaagatgttctgctttccaatataaaggagctggtacccttcactctccttatcctcaccaggaatcagccgttttgtcagcttcacaaactgcgtggagagaggcaaaaacaaaagtgtctgaaaggtcttataaaaggtatctgcatttgccacacaccttcccacatcggagcccgaaattttcagaataaagggttcaaaatactgcatgccaaagacaagcagccccccgataataatcatgccgaagacattaaataatacatgaatgagagccgccctctgggcatcttttttcgcttccagacaggccaggaccgccggcgtacaggagccgatattacagcctaaaattacataaaaacatactgggagtcccactagtccctggcttgccatcagcagcagaatacttaccgttacagaagagctctgcacaatcacagtcagaacagtgccaagcagaatcccaagcagcggattatcaaggctgccaaggacctgcagtaccgtctgatactgtctaagtcctgccatagcatccttcatcatactgatccccataaacagtgccccgaatcccagaataacttcccctattttttttaccatgggttttctgccgaacatcataaatacggcgcctacaaacaagataaatggggcaacccctgtgagattaaaagcaaccagctgagaagtgatagttgtaccgatatttgcgccaaagatgattcccacagactgagcaagcgacatgattccggcgttgacaaagctgacaaccataaccgtagttgctcctgaggactggataattgcagtaaaaagtgcgccaaaaaaaaccgctatcattttattcttggtcatggcctccagtatattccttagttttgccccggctgccttctgcagcccctggctcataaaattcataccaaataaaaacagaccaagtccgcctaataacgtcaaaagtaattccatcattttctccttagttttaacaagaattgccgcatttcacagctcctgaccaggtattataatccggaacagcggctgtgaagtacggccggcatacagccggaggttcaccttggaatccaggcacctccggcattaaaataataacggctttttccgatctgtaaccaaccggcagccatcgctccgcttcctttcaggtaataccaggtacttcccagcttcagccagcccgtggccatcgctccgcttcccttcaggtaataccaggtgttcccaagcttcagccagcccgtggccatcgctccgcttcccttcaggtaataccaggtgttcccaagcttcagccagcccgtggccatcgctccgcttcccttcaggtaataccaggtgttcccaagcttcagccagcccgtggccatcgctccgctctccttcagataataccaggtgttcccaagcttcagccagcccgtggccattgctccgctctccttcagataataccaggtgtttccgagcctcagccagcccgtggccattgctccgctctccttcagataataccaggtgtttccgagcctcagccacccggtttgcctgtagccgtgattattaaaataataccatctgttttcaatcagcacccagcgggaaatgggatacgtgccgtcggcatacacatacctccatccctcactgttttgtacccatccttcttttctttcaggaggcggaaccacggttttttcagaaatactcacagtaaaataacagtatatattttcactgtaagaaacttttatggtttgactgcctgtgcgggaagagtcgaagcctgaaattccatactgggaatcattcaggcctatgactgtattatcagccaaaactgcctgtactgccatccctgatgtatccagctgttcccctgtctcatattgccttttggccggaggaatacaggtaatcctcaccactggattctccgtgggatccggtgtgtctgtgccggaaggctcctccagtttctttgttttcaaaaaagcaccgggataattggtatatgctatatagatatattcattatctgtatgaagagcaacctcaggataagaggcggtatctactgaacgatccaccgcgcctccaaagggttcccataccgcatccttataccgatacaccgagactttgtagctctcaccagaggaagcctgcataactgccgcatacggaatccctccggccaccgtcaaatcacaggcgattccacgtgctgtcattgcaaaatcacctgccgcagaccagtttccttcagaaaaccggtatgcctgaagtgtctgtccgtcgtcgccgtcaatagccgcacagaggtaaaccgattcttcctcccccggagagaccgcaaagatactggatacagcttctggagccggcagttcttctatagatgcatcacctgctattttatatacagaaatctggttgtccggaaaagagcgggccgccagatatgcagtgtcaccctccgcttgtatggatggattatatctctcccccagacttacagaggtaacctctctgctgtccggctgaaatcttataagcttcagatccggggttgcctccagagtatccgtataggagatgtatagactgtctccggcggcagcggcctggtagtctctgttatatacgttagacgctaatggtatggtctcccaactgccatttacgaacatagcagcaaaaagggtgctgctcccgtccatctggctggtatacaatatacaggggatatccctgtaaaataacagccgttcgcttccggcggccgccgccggaagcccgggagcgactttgctccagctgctattattccaatgggacagatacacagtttctccatcgtcgtgaacagcatagatatcattggaggaatgaatagcggcagagaactgggaggtgaaagcgaaatctgtatccaggccgcaggtgtcccacagttccaggtcccccaggtccccgaattcaacgtcaaaggtaatattctctccccctccggcactcacattttttattacaattcctgaattgcttccatccgaaaagcttattatactttcttccggcgtattgtctgcaatggttcttgtaaaatccgcagatccaaaggacgtgcggtttatctccggagccgcagacaggaaagactgactgagatctttggaacaattctgttcatccgtcacccccggccgaaaaatgtagacaccatcttccctggaagcataattcgtcagacctgcaaccttggtatttatgcggtagataatcagcccgcttcccggaatcttaatatccaaaggcttgctgctgaaatcataaaccggctttttcctgtattccactacaaaaaattcgttggaggaaagaggggatttcagaatatatgcatgagttccttctgcattcgtctgggtatccaaagtcaatccctttgcagattctgtaatggtatctatttgcgtccatccggcagcagactggcgcaggtaagcaagtgggtactgaagatatatggaagagcttgccataagatcccaggtccctactgggctgtcatctgccgcaccgtctctgtataagtcgggaaatcctatggagtgcagaaattcgtggcagataacgccctccctgcttatgctgtcttcaaatacactgtatccgttcagcatattgtaagaaaagacttcctttcctccgatggtcccgctgccgtcgtaattagccttgtgggaataaaaagggctcccccgatcatcggaaaagggcttatctgccactataaccagattgtccaccgttccgtccccatcataatccagagtctcggatgtctggatctgatctatcacataatcgaccagagaatattcatcagaagctgactccggcggaaccacataaggggtaaaagagacgccgtcatactggggaaaaatattatgtacctgaaattgtccgtaagaaatctctgtaaggtaactggagagagaggttccgtatcctggatcctcccacagtttaaatatttcttcgcctttatcttttacaaaattctttgctgtgaggggttcaaactgtacaaaaaccactaaattggcaaattctctgacttcctccttccgggaagcggctgatgtacagacaggcggcagcagactgcctgacagcaatgcaaatatcagcagacagactgctgttttcgttttctttttcataactaacctcctgtctgaataacgcctttctgacagcctttataatttattctgtcaggcatcgtcctcatgacctaatcacttgcgccggatgaagcggacgccgccgcagtgctcgccgcaatagcagctaacagcgccgcttcctgagcagcaaccatggaaatggttccgcttattgctgctgtattcaaagctttaggttcctctgtggtatattcatctgcaaccagcattccggcatacatcacacgctgcttcgctccaatgccaaaagccccaaatcctttctgggtcttcagataatcgttcacttccgcaacctctgaagctaccagctctgttccggcatccaaaagcgccagtactcccagagtaggcagctcataccctgttccgtatttgcagccagctgatttgagtttttcaaaaagctctatagatttgcggcatttttccccgggactcccctctccaagagtcagtacatgactcagggactgaacggcatttccggagaagaaatgttccttaagtactttgtaacattcttccatttcctctacagccagtctttcatccttatttgacagggcaagcagtaccgccatgctgctgtcctccccggaagtcaatagaggatgttcttttttcataaggtcatagatgcgccgggtacgccgggccacctcactatattcctccggctggaccatatcagccgtaataatcgctgtgacaggcagatatgcggaggaataaaactcattttttaactccccgtaagcactcaaggagtttttaagcctcctctcagggctcgcatctgccgccagcagagatataatcgctaacctggacataccccgaaaatttgagaagggtcctgtctcctgttttaacagctttttgcattcctccatccgctcaatattgacggacatgtttctgcctgtaaaaatacttgcggacaggggatacatgtagctgttttcccagctgaaacggctcctgatttcatttctgttctgtacaaataattcgcatctgctcttcattgcctgattcatatgagttctcctattcccgttctctgaaatcacttcccggcattaccgcccaatactcaatagcatagattccaaaaaagtggggatcatttcatttacatggatttaacattgtttttacaattcattatacaagataacggcatcaatttcactagttttgacacagtaaactataaatattttattttctctcttctcaaacaggggctgccgcactaatttagtgccgcagcccctgtacattacttcccttggccgggtataaaagccagcattttgactacatttaccgattctcacaaaaatccgcaattttctgtcctgtgggagtacagcagagtcctccgtacgttcctttcagacacacagggagttgtccgcccacgcggttcattgtttctatggtctcatccagcggaatctgtacagaaaaaccacataaaaccagattggctgtagaaaccgcattggatacggccatagcattccgggcattgcagggctcatatccaactgatacggcgtcacagattagacctaatatgttctgcagcgttacagtcgccgccatgtatgcctggctggcgcttcctcccatcaattctaccacacccgcggaagccatagcacttgctgaaccgcactccgcctgacatcctgctacctcccctccgaaagtagcctgatgggcaacaaagataccaacgcttccggcagcaaacattgctttcgctatttcctcttcactcagtttcatatggtctcccagatagacaactgccgccggaagaattcccaccgagccaaccgtgggggatgccacaaccgcaccggggcgctctacttccaccgattccagaactccgactgccacgcatacaatgtcatttaacaccccaatgtctgccatcttaatcttcttctcttggatcttccgatacatatgtgcagcttgtatgggataaagtccgcccaccttttcatccgtaatggtttctattcctctctttacagattccctcatgactctgacaatatttttcataatatccataaccttttcacgggtataaccgctgcgggccatctcataagcgattcccagctcgccggcactgtcaatgttatgtgccttcccatattccagcgcttccgccgctgttttaaagggtatattgtcatactggaaacgggacaaaacgggaagtacatgttcggcataccgtacacaggcaacaccttccagcctggaaaatgcatgcagcttctcctcacccagctctgctctggtctccagataaagaattcttctgtcctctcccgtgctctcttttattctgcattcatcctcaataatttccgccgcctgtttctcaatctcattattctgcgcatctttttccagatagagaaaaagtgtgttaaagtcaccttttatacagatgggacattggtcaatctctacaatctcaatggctcccccgccaatggatgtggtgcccagagtcatcttgtctccattttctcctgtcaattccaaataggcataattcggctgtttattctctttcggctctttcacaaactgaatctctacccctctctcacgggcaatctccagtgcatctgtcatgtcctcgctgtctatttcaattcccagcagtccggctgtaaatcctctgtctgaccactgtaatttataataggcggcatacgaactgttggggtcaaatgaaattctcgcctgccgtatattccctctcagcagcatgcgggcagtagccccaattcggtacggacctgcagtatgcgaacttgacgtacctaccataatgggcccaaacacctcattaaaaatacttccataatatgtatccatgttatcctccttttaagatcttacgtatatttacaactttataaatccactatagagtcagtaccgccacatgtcaataattatcccccaaacccttctgcttttgtcaaatcaaccagaaaacagcaaaagggataacaggctctttgacctgttatcccttttgctcatacaaaacctctatgcactaccgaacagtattgtttcgcgctactcagcctgggtaatcataatatcaccgtcatcgcaattaaccacaattttattctttgcgctgttgtttgttctgatacgtttttcatcgttaccaccaacagacatttcagggtatcccgggagttctatgtttccatactctgtttccagttcgaattcataagtctctgtttttcccagaaggcccagtcttacgttgccgtactcgttgtcaatccgtatagcctttgcactgcatctgtctgcggagaagtctccgtcgtccagttctgcttccagcctctgacttttcactttacccagttcgcactttccatattcattataaagtattgcagcagcggcgtccagagattttattttcaaagttccgtcatccatattgattttaagcttctccccctgaacatttcccagatccacctgcccgtaatcatttgtaatctccatggtttctgctttcaattgttctgcccggatgtccccgtcattattttctaatctaatcttcgtaaaatatttttctgcgggtacatataatgtcacataataatgcgaaagagcggcatcgatatctcctatggagaaaaagttaaaaccaatgaatccaccggctgttctttctttaaaacttagcttctggttcttcacctccagcgcaggctttggttcactgccgtcaaggcggtactcgatataataaccgtcagagggaataatctccagatctgcatattgtatggtgatgtctatggttgagaattcatctaatttcattttttcctgaatataaggtgagtcggctccactttcatttgctgtgtggattccggatttgtcaatatagaatcccgggcgccctcccagcagtaatccaagtataagtaagactgcaccggcgccaatacagataaacgaagccagatatactttatttttcactttcatgttttttccccttccttgctatctttccaaataatcctgtcattccatttaaaaatcgcctgctcagccataagcatccttttaccacccagaatccgattccaatggcaatcagactcaaaccggtgcttgccagtccgttaattggtgatgtaaaaagcagccacaaactgccgcccaacagaggtatcgcagataacgccaaggcaaccgctgtgacaatcagtgcaaacaggatacagaaaattaccagtacaaaggataaggcaagaacccctgccgcaaaagccagtggaaggccgattggtgcggcgaaaacagctaagatgcccacccaaactgcagaaaccccccgtttcacacttttctgtgattccatggcattttggactgccagcgaacggataatttcatcggcagcagtatcagggcttcccagatcttcaatggcctgaccctcctgttcaggtccggcttctgcaaaatattcctcaaaatattctatagctttgtcgaagtcttcttttggaagtctgcgcagattatgccgcatctgcctcatatattcttctttattcacactcttctcctccttcaacaattttatcaatctcacttttatacagttcccactctctcaaaaggacttgatactgagacttgccttcttccgtgatttggtagtatttgcggttgcgtccctgatgctgctcatcatagacagtcagacagcggttttcctgcagtctgcgcagaacagggtacaatgtggagtccttagtattcgagacagtttttataatctgactgatttggtaaccataagcatcttcttttgccacaacagccagcacaagcagatcgaacattggtgcatttaatggaaaaatcataatactctcctttcctatatgctttttatatgtatattatattccgtataatatgtattgtcaacatatatattttgatttactatatctttgtgctttttaaccgcagcctccgtattccactttctagtccattaacactactataatttggttcccggaacattaaaaaaggaataacaagtatcaaatccttgttattcctctcgcacactctgcctattcattcaaaagcttacacaaatcttctattgagacatccattcgaacagaagtttcttccatggtcaagcctgaatcaagaaaacgggttactaccattttcatacattccccaacttcaatcatatgtccgtctaaatcatagaatctcacgacacgctgtccccagccgcactctatcacatcactcacatactccagattagaatattgctctaaccgtttcagaaaacaatcgaattgttcctcttcaaaacaaagttctatgttattgggtctttgtattattctgtcttttggcagctgtaccagccagtcaaattcctcctgcaaagataatccgcaggtaaatgaaatattcttgccgtaatcctgatctaccttcagtccaaataaatcctcataaaattttctggacgcatttatatcatgcacggcaattacagtgctcatgtacttcatgctttgccctccttggttttcttctagtttaccacagatatttacttgatttataggaaataaacgacattaatattccagattactccagcattatccgcactgcctcccggggagttacagagtgatattttttaaaatccgagataaagtgggattgatccgtatatccgtatcggcagacaatattcatatagtcaatatttcgcaaggcaaccaactcctgccagacagactgataacggaccagactcattaactgcttgggagttgtacccactgcgtccagaaaaatcctctgtacctggcgttcgctgtagcagaggtgccgggccagctgttttaaggtaccggttcctttctgtcttaaaatataatctaccccattaaaaaaaggcagagaaatttcatccgtccgcatcagctttttaatatatgcttcggcaatcagcattcttctgttaaacaaaggctcctcaaatattttttcgcacagttcctctatggatggaaatatatccccggagggcaccgcttgatttaaagttccttccatgggaagcctgcttatacaattcatagcccacataggaaacctcactgcaaaaatggaaatcttcttatcctgctcatcccaactgtcaaggacggggcaattgttcaggcctaaaaaaatatgcttgatccgtcctgttctatgatttttaatgagcatcaaatcaaagcatgtgtcaggtataatcaatatatggccgtagatggaggactcatgagggttgaaactgcatgcggatccccaaaagcagcggatatacggctgtaacaaaggagatggcacaatgttaacatatgttttatcctcagtaaaagggactgcggttgcggacctgtatctggtgtgaaagtcaatggagctcatcctattcctccgttcgcacttaatctcactatttatgatacggttcatgattcataatccgaaaactccggtatatctgttccagcaaaatcatacgcataagctggtgtgggaaggtcaaactggagaaactaagtttttcatctgctcgttttagaacagcatcactcagtccaagagaaccgccgataataaaagtaatgtggctgcatccctgcaccccgagtttttccagcttttgagacaaagccaccgaatcaggcatatctccgtcgatggccagagcgatgacataggagtcatccctgagacactttagtattctctccccctctactgttctaatttgatcctccagagctttactcgctctgtcaggggttttttcatccgccacctgaaggatctccagacgacagtagcggctgaggcgtttcgaatattcatcaatacccgccgtcagatacttttccttgatttttccaacacataagacagtaattttcataataactcctttggggacaggccataacgaatttgggacgtgttctttttaaaaagaacacgtcccctttttatttattttttagaaaggaactcgtggattcctttggctcctgcttttccggctcccattgccaggataacggttgcagctccggttacagcatctccgccggcaaatacgccttctttggaggtctggccgtattcctcatctgctatgatacatttccttttgtttacatccagaccgatggttgtggatgagatcaatgggttaggtgaggtacctaaggacatgattacggtgtctacttccatttcaaattcggaacccggaatttctacggggcgtcttctgccggaagcgtccggttctcccagctccatgcggatgcatttcattccttttacccagccgtcttcatctgcaaagatttctaaaggattggtgaggagatccatgataatgccttcctcttttgcatggtgcacttcttctactctggcaggaagctctgcttcacttctgcggtatacgatatgtacttctgctcccagtctttttgctgttctggcagcatccatggctacgttgccgccgccgataaccgcaacctttttgcctgttttgattggggtgtcatagtcatcccggaatgctttcataagattgcttcttgtcagatattcgttggcggagaatactccgctggagatttctccggggatacccatgaacatgggaagtccggcaccggaaccgatgaatacagcttcgaatccttcgttctgcagcaattcatctatggtcgttgatttgccgattactacatcggtttcaatcttaactcctaaggatttaacattttccacttccactgccactaccttgtcttttggaagacggaattcaggaatgccgtataccaaaacaccgcccggctggtgaagggcttcaaatatggttacatcatagcctaatttggccagatctcctgcacaggtcagtcctgcagggccggaaccaatgacggctaccttatgtccgttggaaggcatgggcggttccggctttacgccgttttctttggcccagtctgccacaaaccgctccagttttccgatggaaaccggttcaccctttattccgcggatacatacaccttcgcactggctttcctgaggacatacacgtccgcatactgccggaagggaactggatttgccgattaccttataagcctcggcaaaattgccttcttttacttctttgataaaccctggaatgtcgatggataccggacatccggatatacatttagcatttttacagttaatacagcgggaagcttcttccatggcttcctctttattataacccaggcatacctcttcaaaattcgctgctctggcctggggatcttgttctcttacaggtacttttgttaatttgtcagccattatttatcacctccacaatgtccgcatccgccgtgatgggtgtccccctcgcgaagctttaataaagcacggccctcttctgttttgtacattgcctgtctcttcattgcctgtgcccagtcaatgagatggccgtcgaattcaggtccgtctacacatgcaaacttaatctcatctccaacaacaacacgacaggcgccgcacataccggtaccatctaccataatagggttcatgctgacaattgtagggatatttaattttttagtggttaaacagcagaatttcatcataatcataggaccgatagctacacagacatcatactgttttccttctgcggtgagatcctcaatcacctttgtaaccataccgtgacgtccgtaggaaccgtcatctgtcgtcacgtataagtttcctgccactgcttccatttctttttcaaggattaccaaatcttttgtcttggcgcccacaatgacatctacgtctacgccatgttcatgaagccatttgacctggggatacaccggtgcggtgccaacgcctcctgcaacaaacagcatttttttcttcttcagttcttcaatatcttcatggataaattctgaaggctgtcccagcggaccaactacatcgataaaagagtcgcctgttttcaaatgagacattctttcagttgatgcgcccaccggctgaaatacgattgtaatagtgccagcttctttgtcgtagtcgcagatagtcagaggaattctctctcccacttcatcaattctaacaatcagaaactgtccgggctcacagtgcttagcaattctcggagcctcaacctgcatgagaaaaatattccctgcaaggttttctgcgtgtagtatcttgtacatagttccctcctaaaaaatatgtattcattattacataaataacgtgtatcactgtctagtataaggcaaaatgcccaaaatatcaacgttatttttttaccaatctagtaaactacgtaggtttcgctggctacattgctcactttaccatcctcatccactaaaattaccgaaaaaatattttccccctcctgcatagatacaggtccccggtatcttttgctggaggttgtaggagtttcattaaaagcatagtaggcagtacagccttccggtactgtcactttaatagtatctgtgatctcaaattcccctgaagtaggtgtaatctcaggtgtcccaggtcccaccagcgtaatggtataattctgtgtgacgatttcgctgggaatccctttctcattgtaggcaattacatttaataccgtactgccctcagggagttcaatgctgccgctgtacggtctgctggtcttatccgggatacttccgtctgttgtgtaatagatggtatctgaatcctccgagggataaagattcagctttaatttctttttgtaggtaccggattcatcgctgaattttggtacctcacagacataagacgcgtatttctccagaatcttttcctccgtgcagttatccatgagtgccttgatttcttccgttttatccagtgcttcatagagccgcagaagctgtccgtaggcgttgacactggtgggatgatttttcacagctgattccaggatgggaagcgctgtgccggtatcaccctgagcagtaaagatttccgccagcagaagatttgcctccacactgtcaggattcagagaaagggccctgtctgcatatgttaaagctttatcaaagttcttgttggaaagctcggattctgcctgggccagctgataatcaaaggaattatagttttttctgttaatgataaaagcaatcaatgccaggagcagtacacagataacaaatcccagaacagtagtatgtactttcttctttttttcctctgcttttcttcgggcctcttcctgttcctgttttcttcttatctcttcggggtctggaatgctttttttaatctgatgctgctgcatcagagtttcaagtgttgaataatcgggaacccattgtacttcctgtccgcagacaggacaatacagggtgccatcctgcatattcgctccgcactttgagcatttcatagtttaatacctcatttcttttatttgcaatgatccttttacaagcactcttcaatgtatcgttcaaattcttccatgctcatcagcacttttctgggtttggtgccttcctcttcgccaactactccggcgtcgcacagctgtcccataattcttgcagcgcggttgaaaccgattttaaacatgcgctggagcataccgatagaagccttatctttttctataataaatttgcctgcgtctataaaataatcgtccagatccctgcccccctcagaggcccctgcagaagaggcggtctgtgcctggttgattttttcttcgatttccgcattatattgaattccatggttctgctccgataaaaagcggacaacctctcccacttccgggtctgagacaaaagccccctgtactctggccggcttttgatatccctggggataaaaaagcatatctccttttcccagcagcttttccgctccattcatatccaatatcgtcctggaatccacgccggaggagactgaaaaggctatccgggaaggcatatttgccttaataagaccggttattacattcacagaagggcgctgagtcgctataatcagatggataccggccgccctggcaagctgagccagacggcagatagcatcctccacctcgcccggagcaaccatcatcagatccgcaagctcgtccacaataataataatctgagggagaggcttcggcttagtttcatcctcaatgtccttgatagcagccacttttttattgtagccctttaagtccctgacattatattccgcaaatttgttgtagcgttccgtcatctcggcaaccgcccagttcagagcacccgctgccttcttcggatccgtaacaacagggataaacagatggggaattccattgtatacactcaattccaccactttggggtctatcataatcagcttcacctcttccggatctgctttatagagaatactcataatcagtgtattaatgcagaccgatttgccggatcctgtggctcccgcaatgaggaggtgcggcatcttggcaatatctgtaattacaggctggcccgcgatatccttgcctgcggcaaaggttagttttgattccgcctttctgaaggcgtctgtgtctatcagatccctgagcataactacactgttcttttcattgggtatttcaattcccacggcagcttttccgggaataggtgcctctattcgaatatctgtggctgcgaggttcagcttaatgtcgtctgtcagtcccacaatcttgctgacctttaccccctgttccggctgaagttcatatctggtaacggttggcccgcagctgacattggtaaccgtaacttcaaccccaaaactttttaaagtatcctcaagctttctggccgtttctctcagatgtaaatccgagtcgcctcccgctccccggctgccttttttcagaagagtaaccgggggaaactcataggcgtgggtctcagctgcagtatgcgttgcaatctcgtccttaatattgctgatgccgctctcgatttcttccttggtagaacgcggattcctggagactgtattttctttggacggctcctccgaagctgcttctgccgggggatcggagcggtggatctcaaaggtttcctcacgggactcttccccggagggttccggaacatggactgactccgccatatcaactgaggttccggctgattttcttttccgtctggccggcttttctttaaccggctgttcttctggagccccagcaggtgccagattagcatccaccaaagtatctttcgccctgcgggaacgcctgccatccccctgttcctctctggatgccgcagccgttctctgggcttttctggtcttccgctcgctttgggctgtctggtatacccggcttcccccttttttcaaaaaggaaaaaaaggaacgctgtgtgattagaatcaatgagatgatgagggctatgataaggattacataagcgcctgcaatcccgaacgccatactgcttatattgcaaagcagtccccctaacactcctcccccggttttatattttgacgaggtttcataatattctaaaattgttgtaccttttagatacccctctgtgaacaactgcattaaaccgcaggctgccaggaaaaacaggatgctgcctatcagcttcctgcgcgccagcttgttctgtctgttggatatgaaaaaagcaattgccagaaacaaataaattggaaatatataagacatgagaccaaagatcccaaagaaaaaggcactgatcccattgccaaccacgcctccaattccaaaattactgatgagcaggatgattgacagagcaaggattaccagcaggaatatttctccataaagcaagttctcagaagcagttttcctgccggcagtcttcttttttgttgttctctttttcgctgtggccattcgggctcccctcccttattgttttacgcaattacaaagcaaaatgacatacgatcgccacaatacccatgaaaaagcaatagatggaaaaataccggaactttttcttctgcaccataacaagcatggttttgatacagatataccctacgatacccgcaattactgtacctccgatataagtcagcatcatctcccagccaatatccaggcccggaatatctttaaattccagaattgccgctccgagaacagccggaatagacatcaaaaaagaatattttacggcaaacttgcggttaaacccacagagaaggcaggctacaatcgtggtacctgaacgggataccccggggaatgttgccagaccctgacaagcgcctatcgccagtgcatgccagtagctcacatccttgggaattttctgtccggctttaaaataatctactacaagcaaaagaacgcctgtcaccataaggccgattcccggagccagaagcgttgcggcagccgctgttacaacttctttcataagcaggcctatgacacccgtggggatagtggaaacgagaatcaaaagaatcattttccggtaattgttggagatgatttttttataccgtctggcgtctccttcttttttgttatgtaccattgtcttggcattctgaataatgtcatagacaattctgcagaattccagaatcagacgggcaatgtctttgcgaaacgcaatcaagattgcgatcagcgttcctacatggagcattacgtcatataagattccagtttcggtattgatctttaatatattttcaaatatagccagatgtccggaactgctgatgggcaaaaattccgcgacaccctgtattactcccatgagcagggcttctagtatcgtcattgtacaattccttttcttttgtatttaagcaactgtgctcaatccgatattatagcataatttccggttttgcacaattagtaattcgtgtaaacagtctcagaccgggggagtttccagataattccaccccgctcccggcctgaggaaaagttactgctgtttggattcctcaatcagctgatagagctttttcagtgcctggctgatgccgcccacttcatcaatgagaccttccctgactgcttctgtcccctccagcattgttcccacatctttcaccaactgggtagtgtccagcatcagggtttctattctctcctgcttcatgtttgagtgggcagagataaatccggtgattctgtcctgtatcttttccatgttcttataagattgcatcacgccgataaacataccgttagtccgaaccggatgtatgaccatagtagcacttggcacgataaaggaatagtctgcggatacggccataggcacccctatagaatgtcccccgcccagaacaagagatacggtgggtttgcttagggatgcaatcatttccgcgatggcaagacctgcctccacatccccccctactgtattcaaaaggataagaagaccgtcaatatcctgattgtcctcgaccatagcaagcctgggaagtacatgttcatacttcgtggttttgctgttattggacagggattcatgtccctcaatctccccgataattgaaagaagatggattctgtgatcttcgttattctcgttgagaattacctggccgaattcctgaatctgctcattctgtgccgcggttttgtctaattctttctgtttatttgcatctgtattattattcatagctgcctccttttttgcagatagtatgtgtgaaaggaggacaaaaaatacgggaaagcgttccgaaaatgtaccggaaaactttccccgctttttctcttaattatattacagcagttctttactcatcccaattgtgatatacatactgtacatcatcatcgtcctccagaaggtccagcgtcttctgcagatttttaacagcttcctcatctgtaagttctacataggtctgtggaatcatcgtgacctctgcttcaatcatgggaatgttcatagcctcaagagcttctctgaccgccgtaaatgaatccggatctgtgaggatctcatagctgtcatcttcctcctggaagtcttccgcgccggcgtcaagggctgccatcatcagttcatccgcgtccatctcacattcctctttgtcgatgatgatctgtccctttttatcaaacataaaagacacacagccgggagtgccgatgcttccgtttcccttggtaaacgcactcctcacatttcccgctgtgcggtttttattgtctgtcagagtatctacgataatagcaattccattcggaccgtatccctcgtatgtaatatactcgtaattatcggcattggaatctccggctgcttttttgatacccctgtcaatggtatcgttgggcatgttattggctttggctttcgcgataacatctctgagcttactgttattggccggatccggccctccctcttttaccgctaccacgatttctctcccgataaccgtaaagatttttcctttcttggcatcgttcttttctttcttatgctttatgtttgcaaattttgaatgtcctgacatgcttcttctccttctttttcttcttgtaatttttttacacggactttttgaaccgtattatttaatacggacaggatttcgaaggaatacccttttccctgtacctctctgtcctcttctatattgggaatatgtcccagaatagaagttaaatagccatttagtgtttcatactcttcttcctcaaaatctattcccagcacttccccgacctgttccaaaggtgtaaggccatccatgatcagagtattatcatgctgcgtctgtatgaaattatcgtcttcatcgtattcatcgagtatatttcccacaatttcttccagaatatcctccatggctaccaagccggaggtttgtccatattcatccacaacgattaccatatgcacctttttagcctgcatatgcttaaagagcagattaatatttcttgtttcgggaataaatacagcgggacgaatgagatgggaaatctctttcagctgcttattcccattatggtgataggtcagctgcttcatggcatccttcagatgaagaatcccctgaatattatcaatatctccggaatacaccggatatctggaattgcttttttccagcataacgccgatcgcttcatccaatgtcaattcctcatccaggctgttaatattcttccggtgagtcataatatcctttgcctcggtatcgctgaattccataatattctggatcatctctgcttcgccttcttctatgaccccctgctcgtgtgcctcgcccacaatggaaataatctcttcttccgtaaggtcgtcagagactttattgggatcaatgccgaagatccggaccaccagattggataattttgttatgacaaaggtaaacggacggcaaagcctcatggccagccgtacaaaaccgacatagcggtaagcatacttctcaggatgataactgaagatttttttaaaggaaaggattccaatacccaacaataaaatcaggataaccagaattacaagtataacagaaatcactgataaaacggaaactgatatgtattggtccagtgcataccctctgaaaaaacggatgagatatggggtaaagccgcgcacgcccagatatcctgccagaatactgaaaagtgttgcaattatctggagcgtgttgacaaatcccgtgggattctccagcatcttcagcagatatcctgcctttgtatccccgtcatccgcctttttctccagttcgctttcactcaccctctgtatggcggctccaaatccatataaaataccgttaataatgataaataaaacaaaaattatgcaggcccataaagggctgctactcccatcgtccatgaaaagctcctttattttccaaatttctcatttgtcattaaaaatatatcattttcatttacgttcgtcaagattacgcctgtatgtaggaagatccagactaatgcaaagtgcctgattcactttcataaggatatcctgatccagatggcagaccttatcttttaatctccttttatcgattgtgcgcagctgttccagtaaaataacggaatcctttacaatggcataagatgctgcatcaatttcaatatgagtcggtaatttggctttattcatcttggatgtaatggcggcgcagattactgtggggctgtgcttattgcccacatcgttctgtatgattaagaccgggcggattcctccttgttcgctgcccaccaccggccttaaatcagcgtaaaatatatcaccacgttttataaccacacaattcacactccgattcttattgccgggcatcgcatacagcggcccggcaattatgttatagccatagtattgccatcttcctcatgtgtattcaaactgtatgtaatttttgctaatcaatcttcttcaaaatagtcggtctgttctgcaatctctccattctttatatatacccggggaacccgtttgttaatttctgttacaaattcataattaaaccgcccgcagagatctcccagttcatcggcagtaatcgtcatctcttcatctgttcccagaagagttaccggatctagttcctgtacattggggatcctggtgacatccaccataaactgatccatacagatcctgcccaggataggtgccttctggccccgtattaagacatgacccttgttggagaggaagcgggcgtaaccgtctgcataccctaccggaatcgtggctatctttgtctcccagtctgttttaaaggttcctcccaggctgaccgccacatcggccggcacagtcttaatgaaagcaatatgactttttaaagacattacaggcttcagagaaacgatatctctttctaccttgctggaaggatagaggccgtaaagggcaatgccggttcgggcaagatccagattagcctccggtacacggatcaaagatgcgctgttggaacaatgcttaagcggaatatgaatgcccgacttttccgccagttccaggaagttaagatagcgatccagctgtacataagcaggacgcttgcttgtttcgtctgctctggtaaattgggaatacaggccttccactttgatattgggcagaagctgaatactttggattaatttaatgctttctgcggtatctgaaaaacctgtgttggtcatacctgtgtcaacggaaaggtgcaccttgattatttttcctgccttctgccccgcttccgacagttcctgtgccatatccagcttaaaaacggtggggcggatatcataggctgcaattgtatcgtaatgctcccggaaagaatagcccagaagcagtataggattgtcaatgccgtttttccggagactgacggcttcctccactgtggccactccaaatccccataggtagtccagatcttttatatgacgggcaatgggaaccgctccgtgcccgtaggcgtcagccttcaggacagccataagtttggtgtccatatgtatattgcgtttcagattttccatattgtgaatgattgcatcaagatcgacagaagcgtagatacggctgtattttttcatatttttatcctctttctctcaaaataggagccagtccccggataatatcccgggccagcagactataggatccaagcttttcttttgcaatatctcctgctcttccatggatataaaccccaagaggagcagctttttccgccggcaggccctgggccagcagaccggcaatcacgccggtaaggacatctcccgctcccgcagtggccattccctcgttgccggtcaggttcagatagcaggcaccgtccggtaggcaggtcactgttctggcatccttacagacacagattaggtttttggatcgcccgtaagcctgtacatttttaggaaattcttttttcagggcagataccgtggtgtggagcagccgggccatctctcccatatgaggcgtaatcacacaggggccgcttcttttcgccagaagttcttcctgtgtgctcagcagattcagacagtctgcgtccagtaccataggttttctgcaatttgccagaatccaggcaatcatatccaaaagcataggatctttgcctatgcccggtccaatggctattacatccgcccactgaactgcctcactgacagcctggggattccagtccgcctccccatatacagagagcattgcctcagggagctgcgtctgcagtataattctgttttcttcccgtgtatgtattctgaccatacctgcccctgttgccagacaggcattggaagccagaaaagcagcaccgctcattcctttggtccctgcgatcatcagcactttgccaaagttccccttattcccggagggctgccgtttcggaagaaggccaagctcgctctcatccatacaggaataatactttcttgtatccccagtctccatcagctgtattccgatatcggcgactgccagctctcctgcatactcagctccggggtagaaatacagccctgcttttgggaaggcaaaggttactgttttatccgccctcaccgctgttcccataatttcccctgtgtttccgtggattcctgagggtatatcaacggaaatcacccttgcagatgcagcgttaatggatgtaataacatcattataactcccgcttacctttctggaaagaccaaccccaaaaattgcatctactatagtagtatattcatcccacgccgggttattaacaaatggtaccctgtaattttttgctatgtctatttgtatgcgcatttcctctgtccagcggtctttattacccactaaaaatatttcagctgtaactcctctgttgtgaagaattctggccattgccaccccgtctgccccattattgccggacccgcatacaagcaaaatccgatctttagaaaaaagcggttccctgatttcttccactgtacacagggccgcccgctccatcaatacaagggacggaatccccatatcctttatcgtgtgggcatccagggctttcatctgttcgctggttactgcgtaatgcatagatccccctcctccttgttcgaaaaattagcagcggaagctccgctgctaatttctcaatttattgttgatgttcatttacatatctgttcaaattataggacagccgcatcaggctttccgacaagtgcacattttctacaatcacattttccggtaaagtgagatccaggtgggcaaaattccatatcgcctttatattattagccaccaataagtcagccatctctgcggctttgtttttcggcagtgtcagggcggctatctgtacactattgttctttaaaaactcctccagatcacttatcatcttaatctcaattccacggacagatacccctgccagtacgggattgacgtcaaacagtccaactaccttaaaacctcttttttcaaactgaacataattagccagcgcctgtcccagattgccggctcccaatataatcatatgatgcacatggtctaatcctaaaattttaccgatctccgtgtacaggtactgtacattgtatccatacccctgctgaccgaaaccgccgaaattattaagatcttgtctgatctgagatgctgtcacccgcatcttctcgcttagttcattggaagagattcgctctactccgtcttccattagttcacccaaatatcggtaatagcgaggtagtctgcttatcactgccctagaaatccccttagcgtccaaaaacttaccctcctattctattcttggttttattatatataaccgttaaaataatgtcaaatgattattggattttttcggttgtcaaattttgttttttcgttataataggtataggaaacggaggaagtgttatgatactagcttgtcaggaaataaataagacatttggaagtatgcatttgataaaaaatgcttcttttcacatagaggaaagagaaaaggctgctttgatcggcattaacggcgccggaaaaactacactgctgaaaataattatgggggagatgccttcggactcaggggaagtaatcctggcgaaaggcaaatccataggttatcttgcccagcatcaggaactggacggggaccacagtatctataatgtgctcctggaggtaaaacagcatattctggacatggaaaaaaagctgcgttccattgaagctgaaatgaagcataccgccggcagtgaactggatcgtctcatggaggcgtactcccgtctctcccatgaattcgagctggtgaacggatatgcctataaaagccagattaccggggtactgaaaggactgggattttcggaggaagactttgaaaagccggtctctaccctgtccggaggccagaaaaccagggttgctctgggaaagctgctgctgtccgagcctgatattattcttctggatgagcccaccaaccacctggatatggagtctatcacctggctggagtcctatctgctgaattatcccggcgcagttctgattgtctcccacgaccggtacttcctggatcgggtagttacaaaagtagtggagattgactttgggaaggtgaccaccttcctgggaaactattctgcctacggagaaaagaaagccatgatacgcaatgccgagtaccaggcatatctcaatcagcaaaaagagataaagcaccaggaagaagtcatcaccaagctaaaacagtttaaccgggaaaaatcaatccggcgtgcggagagccgtgaaaagatgctggaaaaaatcgaagttctggagaagccccaggaagccgcagaccagatgcggatacagctggaaccccagatcgtcagtggaaatgatgtactggaggtagaacatctcggtaaatcctttgactctctgcatctgtttgaagatttgaatttttcaataaagcggggagaacgggtggctgttataggaaacaacggtaccggcaaaactaccattttaaaaatcttaaacggactgattcctccggataccggagtcttccatctgggcagcaaggtacacgtggggtattatgatcaggaacaccacgtactacacatggaaaaaaccatttttcaggaaatatccgatgactatccccggctgactaacacacagatccgcaatgtgcttgccgcctttttatttacaggggatgatgtattcaaacagatccagtccctaagcggcggggagcggggaagggtctccctggctaagcttatgctctcagaagccaattttattatcctggatgagcccaccaaccatctggatattatgtccaaagagatcctggagcaggcattgtgcggatatacaggcactgtactctatgtctctcatgaccgttattttattaaccaaactgccacaaggatcctggagctgacgaaccacagtctggtgaattatattggaaattacgattattatctggaaaaacgggacgagctcacccagatctatgcgcccggagaggagccgaagactgcacaacgatccgcagcttcacctaccaagacagattggcagcagcagaaagaggagcaggccaggagaagaaaacgggagaatgatctaaaaaaggtggaagcggaaatcgaaaagctggaagacagagagaaagaaattgactgcgagatggagaaagaagaggttgccactgacgtggcccaatgtgtgaaactcagcaatgaaaaggctgaaatttccctgcagctggaatctctctatgaaaaatgggaggagctggcctaacagtaaaagaaaggcaagagggcattctgtcattgatagactgccctctcgccttttatatattttatttacagattttctttcactgccaggatgaattcacggctgtttagtaccgttggattttctatggtagtaatcagagcaagatcctttgtcatctttcctctctcgatggttgctatagtagctgtctccagtttatcggcgaaagccatcagttcctgattgccgtccagttctcctctttttctcagagctcctgtccaggcaaagattgttgccacagagttggtggaagtttcctcccccttcagatgtttataataatgacgctgtaccgttccgtgggcagcctcgtattcaaagtatccgtgaggagataccaggactgaagtcatcatggccaaagagccaaaagctgaagaaaccatatcactcattacatcaccgtcataattcttgcaggcccagataaaaccgccctctgctttcataacacgggcaaccgcatcgtcaataagtgtatagaagtatgtaatgcctgccgcctcaaatctttctttgtattctttttcatatacttcctggaatatatccttaaaggtatgatcgtattttttggaaatggtgtccttagtggcaaaccataaatcctgttttgtgtcaagggcatagttaaaacaactctttgcaaaactgctgatggactcatccagattatgcataccctgtgcaattccagggcctgcaaagttatgcaccaattctctcttctccgtaccgtcctcagctgtgtataccagttctaccttaccgggaccaggaatcaccatttccgtatttttatatacatccccatatgcgtgtcgggccagggtaatgggctttttccagtttctgacacagggttcaatcccctttactacaataggggcacggaatacagttccgtccagcatggcgcggatcgtgccgttaggacttttatacatctccttgagatggtattcatccatacgtgcagcattcggagtgattgtggcacatttgaccgctactttatacttcatggttgcttctgcggcatcaattgttacctgatcattggtctcatttctgtattctaatcctagatcatagtattctgtgtttaagtcaataaagggggacagtaattcgtccttgatcatctgccagagaatgcgggtcatctcgtctccgtccatctccactaaaggtgtcgtcatctgaattttgctcattttttacctcctgttattaagtcatcatctgcttttaatatgtcttccaggttataatgtcccagattctctattgtgttaataatgtgctgggtagctacctcttccgccttcccggcgtccctggcacgcagggcatccaggatcttgtgatgctcttcgtttgtctttttacagcggattctattggatatggaagcttttcttaccttctgaacgtactggtgatagtctgaaagggtgtgtgccaggatcttgctgttggaagcctcataaagcagctcatggaatcttccgtcaagttcaaatacctgatcatagtgttccttctgggcatgatactcggacagaaaagcagtctcttccataagatccaactgctcctttgtaatgctttgggccgcccaccgggcacagagcccttccagcttggcacggattcgataaatatcctgaatatctttcacagtaatgccagtcacaaaagcccctttgttgggaacaatatgcaccagtccctccagttccagctggcgcagtgcctcccgcaccggtgtgcggctcacacccagctcccctccgatagcggcttctatcagttcatctccctgctgatatctgccgcttaaaatatcatctctgattttttgaaaaactttgcctcgaagtgacgatttttttaattcgcctcccgggccgtcatagtctgccacaattagacctccttgttaattcgttcccagcgtaattccaagccgctcacaagtctctgcaatcacagatgtaagctcatcatcggtcagtaccgtaacacgtccgtcctcatattctttatctacccaggcttttaccattgctaccagttcgcagtttttgcttacctgtgcatcccccttcagacggtaatgtgtattaatccagtgggcaatgcctgccaaacctgaagtgttggagactgccacctctaccggacggttcagaaacttttccgtgtcaaaaatattatagatctcttcatttttcagaagaccatccgcatggatccctgcccttgtaatattaaatgcacgtcccacaaagggagttctggagggcagacgatagccaatttccttttcgtagtaatctgccagttccgtgatcactgtagtatccatcccgtccagggttcccttcagctgggcatattcaaaaaccatagcttccaatggcgtatttcctgtcctctctccgatgccgaacagggaacagttcactccgcttgcaccgtagagccatgctgtagtagaattgctcactgccttataaaaatcattgtgtccgtgccattcaattaattctgagggaactccggcgtgcgtcataatgccgtatatgataccctgcacagaacggggaattactgcccctgcatagtttacaccatatcccatagtatcgcaacagcgaactttaatggggatctgatattctttcatcagtctcatcagttccagacagaagggtatgacataaccatagatatcagcccttgtaatatcctccagatgacatcttggactaactccaatctcaaggcattctttgatgatgcttaagtagtgttccattgcctgttttctggtcatcttcatcttataaaagatatgataatccgaacagcttaccagaatccctgtctcttttaatccaatttctttcaccagttcaaaatcttttttatttgcccggatccagctggttacttccggaaactgatatcctctttccagacatttataaacagcatccctgtccttcttgctgtacaggaaaaattcacactggcggattttccctttgggtccccccagtctgtgaaagtagtcatacatagtcacaatctgctccgtggaataaggagcacgtgactgctgtccgtcccgaaaagtagtatccgtaatccagatatcgtccggcatatgatgaggaacaatacggtcattaaatgcaatcttaggcacctcggtgtagggaaacaggttacggaaaacattaggggtctccacatctaccagaggatacatatgctcctcaagagttaataaattcgtatgtggatccatctttacaggtctgttttgcatgttctttactccttttctcatttctttatttttgtatcatcgtatacaatcaaacaattaagatgattgtatacgatgatacaatatttgtcaatgcattgcaggaaattttaggaagctaaaaagtcatgaattgaaaagctgccccatccttgaatgttgtgggtgtacccgagatctcttgcggtctctttcagcctgtattttatttccagattactcattgccggatatttttccagaagcagagcaattgccccggatatcattggagtggacatggaagttccgctcttaactgtgtaagaccttctgtctggcttggaggaacaggaaataatgctgttgcccggagctacgatatccggtttgcagatgcactgactagtggggccccttccggaaatcccctgatggcgtgtcagcatatcactggatcccacggttatcacctttttgctgctgcccggggcagtaatggttcccggatgaggccccatgttgcctgccgcagttaccacgataaagccatcatcccaggcagcctccaccccttcaatcaggtctttatgttcatcgtttactttttgtgtggtgcccacagagatgttaataatacggatattgtaattttctctgttctcccttatccattccagggcttttagtacatgagccttgctgccgtttccatcctgatccagcaccttaagtgcgataagatcacaggcgggcgccactccgcagtaacgccccttagaagctatgccggctcccccgatgatgcctgccacatgagttccgtgtccattatcatcgtagggggtgcggcgatgatgaataaaatctttaaaaacaacaattctatcttcaaaatccacatggggaaagataccggtatccagtatggctaccccgatatggcgtccagtcagcttataattagtgtccaattgtattgcctcattgtttatgcttactttaagatattcgctgtcagaaaaaaagccattagcctactttaattctttgcgacataaaatgaaagcaaggaaacatttaaggagattttattggcagacatacgagatatgatactggatcagaattacggagatttcatcatccccaaccgtcagggatttctggaaaattacagggactacggtccccaggtactgaacaggtattacggactgatacacccccccttaaacggaagatttctggagtatctgagcagctttacctataacttcactccaaagcttctgaccctcatggatacggtgagtcttgacgcctccggaatcacaagagtacaaaaccagccgactctgaatttgaaaggaagcaatatgctcataggatttctggatacagggatcgattatacccatccggtatttcgcagaagtgacgggagcagccggatctacggtatctgggatcagacaatccagacggggacaccccctgagggccagtactatggcaccgaatataccaatgagcagattaatgaagctttgagatccgattctccctctgcgctggttcctacggaagacaccaacggtcacggcacctttctggccggtgtggctgcaggctctgcaataccggaagaggactttgtcggtgcagctccggaagcggctattgccatggtgaagttaaaagaggcgaaggattatctgaaggaattctattttgccaccggtcccggacccttttatcaggacacggacattattctgggtatacgctatctcctgtcactggcaggccgcctgaacagggctcttgtaatctgcatcggtcttggtacgaatcagggatctcattcaggggaaacccccctgaactccgtgctgagttctatttcagaagaacggggcacccatgccgttgtagctgcaggcaatgaggcgggaaaggcacatcattattatcagtccacaaatacaaattgttatcacgaggcagaaatcctggtaaaagaaaatacctctggttttactatggaactgtggggttcccccctggaaacatactccgtggggttcgaaactcctcttggggaggtggttcccagaattccggcccggatccggctgacagataccattgattttgttctggagaggactaagatctttgtaaattatgaaggaatacagacaatatccgggggacagatgatatttatgcgttttacagaccccacaccgggagtatggcggttaagagtttactgcagttctgagggaaccggcaactttcacatctggctgcctgtgtcaggtttttccgatcctgatgtaatctttcttcagccaaacccggataccactttgaccaccccctcggcatcggaccaggtaattactcccagcacctataatgcctatgacggaagcctgtttttgaattccagcagaggatacacccgcctgggagatatcaagccggatattgcggccccgggtgtcaatgtattcggtccccgtgcaggaggcggtttcaccaccatgaccgggtcctcggttgcatctgccattacctcgggggcagtggctctgatcgctgaatggggaatcaccaaccccagtcaggaacgggtattcaacagcgatgagataaaaacgctgctgatccggggagcaaaccgcagcccctcaaggctttacccaaatcgggagtggggatacggaaccctggatgtctatcagatcttttcatctttttcatctattcagtaacacatacaggccctgacacataagatgaagtgtaatcaaacaaaaataatggaggaacaaacatgagcgatttagctgctacaaactgtggatgcggatgcgaagatacttgtcagggaggttgcggatgcggtgaccgcggatgtggtgtacgtccggactgcggatgtggcttcggcggaaattcctgtggttctcttatctggatcctgatcctgctttgctgctgcggcaacggcggcttcggcggtgattcctgtggatgcggaaacgacaacaactgctgctggattatcttactgcttctgttctgcggaaacggttctttctgctagtaccagccaataaaaaagccggggagttttccccggctattttcttttataccgccggacgccctgatttatctgaggctcctgctttctcactccctgttcgggagaattttttttcttttttgcacactccaggtcaatttcatacagagtgttatcttctataataagctttgttttgtgtgtattcatagatagctccttaatcctttatagtttatcttatgtcatctcccagtatctgtcatatcttaataatgaaaaacataggctttaaaaaaagtgaatttttatgagtgaacaaagatcagacaacaggacgattctggatcagatggtctcccaggatcaaatacaggtaatgaaagctgcacttccttatgttcccccttccgggcagcgttttctgtcagttatggcgaaaatgatggaactgcagaataccatttccctcttttccaaaccgcggggagagatgagtatctgtgcagtggaaaatgaaaaggtagagcctctggaaatgctccaggatatccgccggttctgcaacggacctacccaggagcggatcgacagccttatcaacactctggtcatggtacagatactcgaactgtcccaggataacaacaacacataagggaggaataaaagatggacaataatggaaacaataaggaaaataatcagaacaacagttggatgaaccatcccaatctgtcagggatggatccggcaaaactggcgatgctccagtcccttgcggaacaaggcagccagaaaggacaaaatgatattatgccatttctcatggcagcagcgtccaaaagtaagtccagcgggatgcagttctcaaaaaatgaaatggataccattattgaggtgctgaaaattggcaaaccgccggctgaggttgcaaagatagatcgtatgctgcagcttatgaaaatgatgcgttaatattaaggggcagggaggggcagacttttgcccctttttcttgcatttcaggaaatggggtgctatactaaaagacgctgaagtatcgtgtgttcgagaccttccacacgttaaacaaaactaaaggagaatcactatgaaaaacaaaaacataacctttctcacacaggcagccgtaattgctgctgtgtacgtggctttgactatgctctttgcccccataagcttcggacagatacagatacgtctggcagaagcgcttacgattctgcccctgttcacccccgctgcgattcccggattattcgtgggctgccttctgggaaatatcatgggaggagggatactcccggatataattttcggaagtctggcaactctgctgggagcattgggcacctatggagtgcggcatttccgccagaaaatcctgctggtgctcccacccattgctgccaatacattgatcgttccctttatactgaggtatggatacggaatacatcttcccattctctttttcatggtaactgtgggcatgggtgagatcctttcctgcggggtcctcggcggaattttactgggagtactgaagaagaggcggcgtgtgatattcaggaacttctaagctctgtgatttataacaatggctgtgttctgcggctttccagcctgcagaacacagccattttctattatttcttaaaattctccagaatgcagtcacggagtaagattagcgcatttaccacggactgttctcttattttgcttcggttgccgttaaaatggaattcccgtaccttggtctcacccttcagacagcaggcaataaatacagtacccaccggtttttcgggagttcccccatctgggcctgcaatgccggtaactgaaactgccacatctgatcctgtagtaaagttgcctccttttgccatttcctttgcgcatttgctgctgacagcgccgtgggtcttcagtgtgctcttttttaccataatgaactttttcttggcagaattggagtaagtgacaaacccctgcttcagaacatccgacgctcccggtacattgacgatccgtgcggataaagcgccccctgtacaggattctactgtggtaagccgaagatgctgagcccgcagcagttcaactaccgcttcctccagtgatttattctcatctgtggtgtatatgtttttgccaaaccgcagcttcaattccctgactaccggtttgatcaattgcttggcctccttttcgctggcggccttggcggttacccggatatgaacttccgcagtcttcgcataggttgctatggttggattcgtctgagcagcaatgagatcgctgatatcggtttctaccttgctctccccgatcccgcagattttaaccatctccgaataaataatctcaggctgtttttttctaagataagggtatacggcttcctcaaacatgggcttcagctcattgggcggaccgggaagcaaaatagcagtctttcccccggattctatgattaacccgggtgctgtcccgttatgattgtccagaacggctgccccctggggaatcagggcctgcttccagttgttggctgttatcttgctttccggctgggactttatataattatccataaatgcctgaattctttccctggtgtgaggatcctccaccagttcccttcccattaccctggctgtgatttcttttgtcatatcatcctttgtggggcccagtcctccgcagagtattacaatatccgatcggtcaatggccgtggcaatggctgtggtcatccgctcctcattgtcgccaaccactgtctgataataaagggaaaggccaagattggcacatttctccgacagataggcggcattcgtattcacaatgtttcctaaaagtatttctgtacctacacagactaattctacaaccatacgttctcctttcgcagcagctgcaggtccttaatcctgcatgctgattacctgcctgttcttccataagtaatctaccagtgacacaacagtgagaatcagcgccaggtaaataaaaacagtctctgctatgtcaaaaacaccgcccagatcggcaatcagcaggattgtcattatcatctgggatactgtcttaaatttgccccagtagcttgcggcaattacaatcccattgtctgatgcaataagacggaagccgctgataatgaattcccggcttatgataatgatcaccagccatgcatgcagctttcctgtctccacaaaacagatcagtgcagaacataccagcaatttatccgcaaggggatccataaatttcccgaaattggtgaccagattgtcccttctggccagatatccatccagggtatctgtgagactggccacaacaaacaaaacaagcgcgatccacttaccggcgctgcccgctgcatctgtcagcataaaaaagacaaaaaacgggatcattatgacacgaagacaagtcagtttattcggtgtattcatcagctaattctcctatcaaatcatattctaaggctccggttacatgcaccagtgcaaaatctccggacattaattctgtctctgtattcacaaaaatatatccgtcgattcccggcgcgtctgcatacgtacgtcccacatatgcattttcatcagccaccttgccttcaatcatcacctcaagctccatcccaattctggaatctcccttatccagagaaatctcctgctggagttccatgagctcggccttgcgctcttctttcacctcttccggaatctgcccgtccatctctgccgcaggcgtgtcttcttccggggagtaagtaaagactcccagccggtcaaactccatctcatccacaaattccatcagttcctcatgctgctcctgggtttcccccggaaagccagtgatcagggtggtccgcaggacgatatccggtatctcccggcgaagagtattcaccatggcggtcagctgctttctggtcgtacgcctgcccatgcgtttcagtacagcgtcattggcatgctggataggaagatccagataatgacatatctttttttcttccttcatgacctgtatcagttcgggatatatctcctcaggatagcagtactgaacccggatccatcggattcccttaactctgcacaggcggcccagaaggagatgaagtgacttttctttgtaaaggtcaattccgtagagggtagtctcctgggctaccagaatcagttcctttaccccttgctctgccagatattctgcctggcggatcagatgttccataggtatgcttcggtagcgtcccctcagtttcggaataatgcagtacgtacagtgtttgtcgcagccctccgctattttcagatactcatagtggcctccggtggtcaccacacggtttgcatccgccaggggcagggaattgatatcctgaaattccaggtatttttcaccggcaaagactttgtcaagggctgtcacaatctctttatagctggtggtgcccagaacagcgtctacctccggaatctcatccgttatttctttttgataccgctgggccagacatccggttaccagaagggccctgcatttgccaacacttctgtactcagccatctccagaatggtatcaatactctcctgcttggcatcatggataaaacagcaggtattaacgactattacatccgcatcctcctctgcatccgtgatttcatatccccgggcaaccaaaagcccgagcatctcctcggaatccaccagatttttatcgcatcccagagagatgaataaaacttttttcactacgtcagtctccttttctttttatgtataaaaggagtgccaccagatacgcgccactcctttcttgttattcttcgctctcttttttatccagctcatcgtcagagacaatcttaactttccctttataaagctcctcaacagcaatggacaaaggctttttcccccgggaactcacaaggggatcttccccgccgataatctgtctggctcttttgctggtggccaggactatggaatacctgctgtttaccaaaggtgcctcatccggttcaagctcactgtttactacctgcattaattctgaataagatggatgtatcatatatcctcattctcctttcataaatacctttaattcatttccaatctgttttatcagggaaagattttcactgactttgtggtgctgactctgaatcacctgatgcatttcctctacgcattgctccaattcatcattgatcaaaagataatcatatctttccatgccctctgcctcctcggcagctctctgcagcctggatccaatgacctcgggggtctctgtgccccgtcccaccagccgtcttttcagctccccggcactggggggggccacaaacagaagaagagcatccggaatcttttcctttacttttaaagctccctggatttctatctccaggatgacatctctgcccgactccagctccttttccacgtaagccttgggggttccgtaataatttcccacatactgcgcatattcaatcagggcatcctcttttatcagttgttcaaattcttcccttgttttgaaaaagtattcccgtccgtcttcttctccctctctgggggctcttgttgtcgctgagacagacagcgcgtaattcatgtatctgttcatcagggcccgcatcagtgtgcccttgccggcaccggagaatccggataccacaaccagtactccttttttactcatcatattcccctttgatctctccctctctgaaagaggaaaatctttttgtaatcgtctccggctgcagggcagaaagcacaagaatatcttcccctgtcacaataacagacttcgtcttccttccctgtgtggcgtcgaccgttttgccggcctccttggcgttttgtaccatacgcttaatgggagcggcatcgggacttacaacggcaattatcttatccgtatttacaacattcccaaatccaatgttaattaactttgccaatggtatccctctctgttactcaatattctgtatctgttcccggattttttcaatctcagtttttagatcaatggctatgttggaagtttctaaatcatttgctttggagagaatcgtgtttgcctctctgttcatctcctgggcaataaaatccagttttctccctatgccgtctccttcctgaagcacatttttcatattatttacatggcttctcaggcggacagtctcctcatccgtgcagattttatcggcgaacaataccacttcagcggctatacggctgtcctcaatctgagaatcggccagcagttctcttgtgcgatcctccagtttggcccgatattccttgagtgtctcaggagcacgctgttctaccagatgaattttatcgttcattccgtctaacttggtaataatgtcttctttgagatgtgcgccctcctttttcctctcctccacaaaatggcaggccgcctgggtaattccttgttccagaaagctccacagctccttttcatccagggactgctcctccataacgaacacttccggatatttcgacagatgagatacacagatatcatccttcagctgaaactcactgcacatatctctgagatatcccaggtactcggcggcgatctcccggttgtactttatattgactcttttctgggtaaagtcctcataagtgataaatacatcaacttttcccctctgaatgtattctttcaggagatttcggatagaagcctcaaaaatgcttaatttcttaggcatccgaaggttaatatccaggtatctatggttcacggacttcatctctacggtgaattttctctcttcatcagcgatctcggcacggccgaagcccgtcatacttttaatcatttcatccactcttttctgttcctgatttgcctcccgggcataaacatacaaaattattataagtcattacaaatccctagtcaaatcctttttcaaatgtattttgcctgcaggcgttttttctgctataataactccagaacggaaaggagatattttatggcattcgacggaattaccattgcaaatatagtacatgagttaaatcagaccatcacagggggaaagatcaacaaaatcgcccagccggaagcggatgagcttcttcttacgattaagaatcagagagtgcagcatcggcttctcatctcagccagcgcctctcttcccctgatttatctgacacagagcaataagcccagtccccttacagcaccgaatttctgcatgcttctgcgcaagcacattggaagcggaaaaatcactgcagtgacccagccgggtctggagcgggtcatccggatagagattgagcatctcaacgagctgggggatctctgccgcaaaactctggcagtagaaatcatgggaaagcacagcaacattattttcctggatgagacggacaggatccttgacagcatcaaacacgtatcctctcacatgagttcagtccgggaagtacttcccggcagaaattattttattccggagacccaggagaaaaaaaatcctctgaatatttcagaagatgaatttgccaattttatatacagcaaaccgcttccggtctccaaagccctctatacctctctcaccggaatcagccctgtaatgagcgaagaaatctgctgcagggcctctgtggacggcggcgcttctgtcagttctctttcagaggctgagaggatccatttgttccatacatttgaacgcctcatggatgatatccggcaggggaacttttgtccttctattatttatgatgacgaggctcctctggaatatgcctcggttcctcttatgaagtatgagggataccggacagaggcgtacgcttctatctcccaggtgctggagcattattatgcggcaaaaaatataatcaccaggattcgtcagaaatccgcggaattgcgaaaagtggttcagactgccctggagaggaaccggaagaaattcgatctgcagaccagacagatgaaggatactgtaaaaaaagacaaatataaggtatacggggaattactcaatacttacggatataatctggaagagggctgccgatcttttcaggcattgaattactacaccaatgaagaaatcaccatccccctggatccaaccatgacaccccaggagaatgctaaaaaatattttgacagatataataagctgaaacggacggctgaggcactggaagaacagctgaaggatacacaaagtgagatcgagcacctggaatctatcagcactgccctggatattgccagaaaagaagaggatctggtgcagattaaggaagagcttgtacagtacggatatatgaaaagaaaaggacctgcagggaaaaaagtaagagtgactgcaaagcctctccattatatttcctctgacggctatcatatgtatgtagggaaaaataattatcagaatgaagagctgacctttaaatttgccgtgggcaatgactggtggtttcatgcaaagggacagcctggttcccacgtaattgttaagacaaacggggacgagctgcctgaccgcacctttgaggaagccggccggctggctgcctattactccaaaggaagacaggctcccaaggttgaaattgactatactgagaaaaaaaatgtgaaaaagcccggcgggggaaaaccaggctttgtcatctattataccaactactctctcatgattgaaccggatatctccgggatccgtgaggtagtctaggctctctttttcggtgcagtgagatcatagctctcctgcaccattcttttaatatctttatccggaactgttccgtccaatatgatagaattccagtgcattttattcagatgataccctgggattacggagggaaaggcctccctccagaactctctccactggggatcacatttaacgttcacccaaatatgtccttcccgctgaaagatccaggcaaataccttctggttttctttatggcgcattacggtccagttgggatcctcaaagggataatcctcataagaattcttaagtttaagacaaaagttaattacttctcttctgcttctcatatctatatgctcctctgcaggcgttttggcaagttcccggtaattatcataagcagacatgtgtccccttgttcttaattatatcacgcaggaaggtcaggtgacaaacctttattcccctgtaccgatagcttccacaatactcatcttcgccgcctgccttaaaggaatgactgtggcggcaagacagacaccggctgcgagtacagatgcctcagcaacggcagacaacgggagctcccggagggaaaaggagcctcctgcagctcggtaaatcacaaaggtgcataaaagaccggccgctgaacctgtaccggcagccaagaggctgtaatacaccccctcccacagaaacgtcctgtacagggatcctgcgctcattcccaccgctctctgtatgccgatttctgtgacccgggtgtgaatattcgtataaacagtgttgattatatttaggatgccgataagcccgataaaaattataaatccccagctgagcagccggatctgctgaaagctctcttccagctgccggtctgtgttccggtaggacagccaggtacttcccgggatctgtccgcagaacccctttagtctttcttcaaatgcagtttcttctgcccggggagtcaaaacaggatatagctccgtatattgactgcttcctgttaatcggtcgtaggtcttatctgtcacaatcacctgtacaccattttgaaacccgtcgttattgacagtaacacaaccgtcagtcactgcggcaacttcaagattatggccctgaatttctatggtatcccctttttgaatctgtgtgcgggcaagttctctgccctggaatgatacagggatcgggtttttaactacacaggcagtcccttcctgtattttggttttcttctcttccggcagttccccggcaagcttccagatgcgcacggtatctatgcctgtgatctggaaggtttccccaggctgaagagaaaagttcaattccagaggaatgtctccatcggcatcctgctgaaagcagctgaattttgtagcctgaagagactcaacagccggatcagcttccagctttgccgcctcgtcgggagtaaagcctgtggatttattggtgacagaataatctcccagatgcatatctctcacctctcttgatgtgtcaagcaatcctgtgaagctctgaagtgcaacaaaaactgcgatactcattgccagggacaggacagtaataaaggttctggcagggttgcgtctcaggttcaggcgtccgtaaaaagcctcaaagtgctttacccgattctttcttcgtctccgtctcccaacctttgcagatgtattccctatggctgtgaccggagatacccttgccgcatatgacgcagcgggaagggaggccaataatgaggacgccagggtaatcagaatactgcctgacactgcccacagactattgtctcccgactggcgtaccagagaaagcaattcctccggggatccggtttgaaatgcctccggggataaaatactcagcacaccttccagaatctctccagaagcagctaccccgccggcagttcccagcggaatcccaatggcacagagtatcaggagctccagggtgacaagaaagtaaagctgccggcgctctgttcctatcgcccgcagaactccatactggctcatccgccgggtcactgtgattttcaggatattataaatcacaagaccgctggcaatcagaaccagaataccaaccattagggcagaaagcattaaaaatgggaatccttgggcttcttctgtctcttccccgtaaggtacgccaagggcgttcaggtagatccagttatactgtatctcttcttccggcatatggatggactcccccagagattctatctgtccctgaaagtcatccagactgcgcagacggagatccgcagcgtacagctggtatttttccggaagtattctttctgcggttttttctccggctattccggaaacagtaccgctggcgtaaccaagataattattttcaagaatacctgtgagaaggaaatcctgcgtatattcccagggcagctggtcatcatggagaaggcttaaggaaagcttcagagagacggtatctccgatctctccggaagctcccaacagctgcagtgcatcctccggcagggcaatctccagaggtctctccggcagacgtccctttttcactctctttatttggggataaatggacaaatcctcctccagatattctcttagctgcagacttagaccgctgttccccagtctggcagttccaaggctttgccagcttgcggcaaattccagccggctgtcagcaaacagccttgctttttcctcccgggtaatctgatgaaaggttacatgcctgtctccgttcagcacagaggcctgatgaaggcgcatagcagaaaggatacctatggactggcagattacagcagtcatgagagaggacataatgacagcagccaggataagaaaggaggtaaccttctgaatcttcagttctctccataccagggatgtgtaggatttcataaccgctccacctccctcaggattccgtccgacataacaaactgccgcccggcctgttctgcaatttgaggatcatgtgtaataatcacaagagcctttttcagttctctgtggatggtcagcaaaagttccataacttccttcccgttccgggagtccagattgcctgtgggttcgtcggcaaagataatttccggccttgcactcagggctctggcaatagcggcccgttgtttctgcccccctgaaagctgtcccggcaggtggtccagccggttctttaacccaagaatttctataagataagataaatattcctcatctggcttccgccgatccaaaagcagaggcatccgtatattctcccggactgtcagaaccggaagcagatggaactgttgaaaaacgaaccccactttttggcggcggagagcagacagctctttatcgctgccactatgtatattcctgccatcataggttacggtaccctttgtaggggtgtccagaccgctgatgatatgcagaagggtactttttccgctgccggatggtcccataatggttaaaaaatccgattctcctatgaccatgtccgcctgatccaatgcagtaatccggccatccccttttccgtatatttttgagacgccgtttacacaaatctccataaaaaacactctcctttctgataaagaagagtgtacgatacaaatctcaattttctctcaaacagggggcatggggtaatttcataaataccgctgatgccctggcaccgataccggtgttattcagatataatttcccctccatcttttcacacaaaatcttgctgatatagagtcccataccataatgcctggcctcttccgcccccctctggaagggacaggggccgtttttaagaatctcttccggatagccgggaccgtcatcggatactgtcagcgtcagataggatcttgattcactcagggaaatatgaatcctgcgttttgcaaaccgggcggcgtttccaatcagattttctgcaatatgggaaaaaagatcggtatccagatatacctggctccatccctccccttccacatcacactgctgctccaaggaaaggatctttaccgtctccttcaattccctgataagggtatccacacgagtttccctgtaccgcacaggcagctgttccaactgctgcacactgctcatagcttctacatattgttcaattctgcgggtataaacctctatacgcctgcgggtctcaggattctgaggatcctgcgcaagcagtgtaagagaccccttcaaaacggttacaggattgcgcagctcatgggaaaaggcggcgttcagatgtcttctgtcctcgttttgtctccacatatcccgtttgttccttaacagttctttctgcatggtttcaaatgcccggcagagctgcccgagttcatcccgggaggcttcaggcattataaaatccaggtcattggcgattactttttctgctccgtatgttaaatcggctatgggcttttttaatttataccggtaaaacagaatatctgccaggaccagccccccggtaagaaacaaggcaggaagcgcaaactgcagaaaggacagaagcctggagagtccatccccggctcctgaggcatcggggggcgaaaagcgcatggctgtttcaggccctacttcaagttccaggcttgtatcagacagagaggaacgaagataaatacaggagccaaaagcaatccctcctaaaaggagtcctcccagcaggcaccagaaagtaagccagaaaaacgcctgcttcagccccatacgttttatgcattccatttatatccgcacccccagacggttcctatcaggtgttccaagccaaaggcagagagtttcgtacgtattttccgtatatgttccattatggtatcgctgttcccgcctccgtcatatccccatatacattcatacatccgctccctgtcaaatacctggccttcatgggacgagagcagctggataatatcaaactcccgccgggaaaaattcacaaattcactgcccacagttacagttctggctgtataatcaacggcaagatctccgaaaaagcgtacgttgcctgacgactgcctgcgctgctctctccgcaggtgtgcctccactctggcccccagttcctccaggtcaaagggctttaccacataatcgtcccctccggcctgaaatcctttaattttatcctgggattctaccctggcagtaagaaaaagtatcggacaggctacgtattcccggatacgttggcatacggacagtccgtccagtccaggcatagtgatatccaaaagtatcaggtccggctcccaggagaccttgttgagcacctgctctccgtctgctgcagtgattgtctgataacccttcatctgaaaatagctgcttacaatctcaacaatacccgtttcatcgtccgcgattaatattttgggagacatttgcacagcacctccttttttcaactataccagctctttctcaatattttctcaaatttttcccgttgcgggactaactactctaatgcattcttgattttcttgtccctgtgaatgatacggtcactgcggtttgcataagaatagcacctggctttcaggaggattctgcggccttccggtgtcctggtatagattagcttgtaatttccaatgcttggggctaccgctcggtggaacagggatgcctcctcctttgttttggcaaacagagagggaaccggaaaccactgttctccccgccgcctctgccgcctgtcatacagcagatacctttggttgtccacagctcccagaaactcttgcagacaggaggcaaagatatctttttccctggcggttcctcccttcagccaggcataaaaaaatataccatcctgctcctgcaccgctacttttgtatcggaaataatatatccgccctgaatcagggctttctgaatcccattccccatagactgcagacgtctgcagggagtaaagatcctggccagcttccccccgtaccggagcagggccattaaacagacagcagaacacagaagaaaaaataacgcgtgaagagacgttccgccctgctttctggcgtagaaataaaagactgagttgcacgcttcaattaaaagccagagaagctgagccccgatgatattataaagcaaaagaccaggggaaagtttctctttcgggatcctgcattcatcggcgacttccggcttatcaaagattaccagcgctttctcccatttttctttcagacactctctgttcttcgccatctgtctcatggtttcgtttattctttccacgctttcaggggtaaacggttccttgattacagtcagccgttcgataccattttcaatggtattttccgtatagctgatccccaaaaaaccttccatcctgcgcttcagagcaatataatcctgagattcctccggaccttccagacataccagatgccagatattgcttgtcttttccggatggccgggcatcacccggacagcccgtccccgcatctggttgctcaggacataggatcctacgaagctggccagtatcagggaattaatacagggggaatcccatccttctcccagtaaagatttggtacccaccagcacctgcatatatccctcttccagaattttagtcacgagaagcgtcgccgtatgctttcttccgcctataacaacttctgtatatccaagagtagttccctctttgtctgtgagttcttttccggttacggtgatttttcctcccgtctctctggctgcaagctcttttaaatagggaactgcttccgagggaagaatcaccatgctgccgcatagaatgcctaaccgcagttcttgaggaaggtttctgcggagcatttcaaaaataggcagtacgcctatattgtctgctgctttcccgggatttcccagagcaggtatatattcttttcggatataatccgtcaaaatcagcagcctgagctctctgcccaacgcctggtattccgagattactatatcctgtatactgttcagctttcccttgctggtaatcagcagcttctctatggtttggttcataaccagacctactttttttctctcgatcaacttagctcttttcaaatcttttaccagctcttcgcgatagccctcctcacagggatagctgtctgtatcctcatacaaaaagccctggagcaggatttccatccagttgggattcatgcggggaaggtgtgttacccctaagagtttcagccacttctgggaatacggaatacccttttcctgaaaaaagataagaagagcggagaggtacggaggattctccaaaagagtatccgcccaggcagcgtaatcacctattccccgatgaccggaaacggcgcttacaaacagttcgtctgacatcagccgttttatagtctcatgtaccattttccgaaagtttcggactgttttctgctcttcccttgtgggataattgaaatacacataatcctggtgggggcagagactcccctctttcacaagttcaggcacaaggatttcttcatccacaggaccgcacagacggctgtagcgttcccactccaatggtgtggaatcatagggcggggttgccgtcagggcaatcatgtagacatccttcagttccctcacaaattcctccagagccttccaccattcacttctgagatgatggcattcatcgaggcagatggtttttattccccgatttctgacagtctcaagcaaattaaaatctgcataatccagagagtgttcttcttcctccgctcttcctttcgtcacagcactgtataagctttggtatgtaatggacgtgatcaggcctggcgtttggagctgattggataaaatttccgtatcattccctcctttgcataaaaaagcctccctcacacgctccacccattgttcccgtatgacaatggccggagataaaatcagacagggctctcccaggcggcgtatcaactcaataccaagtgtcgtcttgccggaacccggaggtgcaacaatatgaattttaccgtcattcctatatagttctgcggattccagaacccgtctctgatacttcctccaagttcccttgaattctaaaatatcctcgtatacattcatcatcccctgctcctctactgccgttccctgagcgtcacatgaactatatcgcccgcctgcttgcccagtgccgttcggatctccttcctcatgcccagaatatgtccaggcgtcttcatgcggaccaaactgccgttatactccataccgtcaaaggcagcacagaccttaacccgccccttgccaaattctgcccggacatcaaaagggatgtcgatataagcaccgtcaatgtcgggaacctttttaatgactgcgtcaaattcataaatcttttcattcattttccttgagattcctttggtttatttttcattatcatatactattcccggcagcggcgtcaaataaactttgatattataaaaagggacagggcatccctcaaatgggacaccccgatcttattttgggacgtgtactttctagaaagtacacgtccccccctccgttttaaagctcaacttccatccattttttgctgtggaatctctttgaagcaaaataagccctcaggaattgatctgccagcagggagatccaggctccgtatatcccaagccctgcaggaaaacacagcagatatgtcagcagagggcgaaagactgcgatatcccagaaggaatattttgccacatagcgggtatctcccgctccccggagtacacctgcgtagatcatgctctgtgtctgaagaaatgtgcacacggctacaaatataagaatattgctgccaagttctattacctggaactctcttgaatagatcagcataagcagacttcggccgaaaaagtaaatcaagaatgccgccagatcaagaatgagtccgcctcttctccctgctttggcacttatgaatgccaggtcttttcttccctctcccagcttttgaccggtaagcgcggagctggctttgctcattccctggctaaaggaatagtatacgtcgcacagattcatacagatataatgtgtggcaaaagccactgtacccagccctgccaccatatacgagtacagaaacattccgatccgctcaaagatctgttcggcaaatgcactgctgcccaccctgaaaaaggattttagaatgatcggatccggcctccaaccgccgcttccccacagatacagttctgttttcctgcgggacacagaccggagggatatcccaaaagataccatacttcctattactgttgccagccccgctcctccgacacccatttcgggaaagaagaaaagtccgtagataaggaaaagattcagaaccgtgttaaccacattaccggacacattggcccataatataatttttgtatctcccactccggtctgtgcggcgttaatgcccactgagaggccggtaaaaaacagggccagcatattatatttcccgtattccactgcctctctgagatattccttatgcgccccggcagctacaagtatctctttcagaaaaatcatggatacgaaaaggataactgtggacaaaaataccgatagcagcattccctgcttcaggcaagtattaagttcctctttcttcccctcgccctttctcctggcggttaaggcagtgatggcaaccgcaagagaacggctgaagcagagaattatcatccttggctgacttgtgattcctaccgctgccaccgcgtctgttcccagggttcctaccataatgagatccactgaagatatcatcataatcaaaagcccctccagagccgctggccatgcaatcctgaaaaacattccatacaaagccctttcccggggaagtttgccctgtacctttatccctttgacaagactgcctaatccaaatatatactgcaacattttacttatcctcgatgtctattttctctgcagccagtatctctctcagataatcaatgaattctctggcaatctggctcaattcgcccctctctcgtttaataaatccaaaagagattaattcttttaaatctgtaacgggaattgcgtgtattgatgttttttcatattgcccctgcagaagactgctacccaagttacacagattagtgtctaacagcatttgtatcataaggtgatcgctgtccgtaactataacttcctgttcactgtttacaggtataaagtcctctttcagatgccccctgtggcttccaatggaaaaaaaatcttcttttgactgtatgaattttaagcttttcattgtagtaaaatcaactgtttttttgccgtacaatggattttggggaccgacaaaaagcatgggagaagtttttgtaagttctacaaactccagccgttttttctcgcagacatgttggaatgcagctctctgtctgtccgatatgtataaaaaccccagttcaataacatgtttatgaagatatcccatgatttcttctacattcccttccagataccggcaacatagctcctcctgctctttcatcgtgtaaaacctggtaaagagtgtggcaagtttggcacttggcacagaagccacttcgagtgttttcgtttgccggatgtttgtaacccctgcaattttttctgtactcatcagaatctcacaggcatattcatacaccttttttccctctggagtaaggctgacacctctattttctctgttcagaagctgaaggttcagctcttcctccaaagcctttataatcttgctgacatggggctgagtcgtatataaagcgtctgccgcctttttaaagcttcccatatctgcactgaccacaaaatactgaaactgcttcagctgcattttttacctctctctgccctatattctgaaaattcctcaaaaagacagcaggccgcctcatggaaaggaccgactactctgacttccggtttcacctttttacatacctccatacacctctcacaccggttaaggaaggggcatccctccggaatctctaaagggcttggcgcttcgctctcaatactctgaattgctctgcaaaaatccatatcgggtgaaaatactgctcttagcagagcctgggtatagggatgccgcgcatctgcagctactgcctctcccggcatcagctctacaatatttccaagatacataactgctaccctgtgggcaaaggactgtaccaaagccagatcatggcagataaaaataatggtcagattcttctccctctgcagtctgacaagaagctcaataatatttttctgtacggatacatcaagagcagatgttgcctcatcacacaccaatatctccggttccagagacaaagccctggcaattccaatccgctgccgctgtcccccgctcatattgtggggataccggtacataaagtcctccggcaagtccaccatctgcagcagcctggccgccgcatcctccttatgggctttggtaaccatccggaaattcatcataggttctgtgagtatatctataattttcatcttggggtgaaaagacgccaggggatcctgaaataccatctgtatattttttcggttctgccttagagcttctcctttcatagaagacaagtcttctccgtggtataaaagctttcctgaagtcggtttttccagctgcacaagcatacgggcgaaggtagatttgccgcatccgctctcccccacaattccaagagtctctccttgctttacctccatagaaataccgctgcaggcagttaacgtcctgtttccgggagccggatattgttttgtcacctgcagactctgtaatattaccggattgtctttatacaatacgcttacctcccatcacaggaaccgcggacagaagttccctggtataagggtgagaaggatggctgagcacctcttctctgctccctgcgtctacaacttcacctgctttcataacgatcaggcgatctgccatataggcagctacccccagattatgagtcacaataataatacctgtaccatagtggctgcgcagttccatcatttgtctgacaatctgcgcctgagttgtaacatctagggcactggtaggctcatcggccagtaacagttccggctgaaaggtcatagccatggcaatcccaactctttggcgcatacctccgctcaactgaaacggatagcttttcattatcgattctggattaggaaggcgcatgcgttccagcattccgctggcctgcttccaggcctctttatggtctgcttcgctgtgctctacaatatattctgtaaactgtgagccaatcttcctgatagggttcaaagttccgccggaatcctgaaatatcatggcaatctttttcccgcggacttctctccaggtatcctttccatacgtgctgatatcctcaccatgaaaagttatattccctcctaggattctgccgcaggccggcagtgcacccaaaacagcccgtatcaccgttgtttttccgcttccgctttctcccacaatactaataatctcagaaggctccatagtcaaatgaaacctatccacaaccagatgttcactgccataagccacttgcaaatcattaatctttagcatttcccttttccttttctactcggccagtgcgatatccttggttagccaataataatccatcgggtacatagaaactcctgtaacatttgcagacgaaatcagatatgtggtttcatatccgaaaaacacagtggcagcatcgtccatgatcagctgctgaatctcaatggtcagttcctttctcctattttcgtcaaattccgcagataattcctccagaagagaatcaactttttcattgctgtacccggcataattgttatttttactattctcattaaatgtcatccaggactctctcaggtatttttccggatctcctgtatttgcaaccagtacattccaaataagaaggtcatactcccctgcttcctgcatgtccagaagtgtttcgtagcttaccgtatctatcgtcaccctgataccgatatctttcaggctcgcctgagctgcctgggcatagatacccagctctgccctgctgtcataaatcacgaaatgaagatccagatcttctccggaaggagtctctacatagccatccccgtcattatctctatatccaccctcttccaaaagggcttttgcaccctcgggatcataggcattctcatccgttaattcatcaaacccaaaatccagagaaggagggaccggggctttgcccgcaaccgcgcctccctccagcagcacatcacagtaggtctgcctgtcaagtccccggattacggcctgtctcagggttttatctgacagcgccctgtgctggttcataaatgcatgggtggagcgcaaagaggataattcctggatcgtataatcttcactgttttcaaaatctaccagattctctactttcagattataggcaatgtcaatctccccagtctgcagcgccatagatctggttgtctgatcatcaatgcattgaaaggtaaccctgttcaggggagcctccccgccccaataatattcattgcgtgtaacaacacaggactctgtggggctgaatgactccactttataaggtcctgtgcagactggtccctccatggcaaaggagtctgtgtcagcggtagtatccacaatcaaaaacaggggatccgccaaacttccaggtactccctgaaccggtgtttccgtggtgattaaaagattctgaccatttacttccatgcttttataggtgaaataagaactgcttgcccggtcattcattgaaaaagtcctctcaagagaagcctttaccagttccggagtcatctccgtgccattggaaaatgttacaccctcccgtatcttaaaagtccaggtcagtttatcatcgcttacatcccatgattctgccagacaaggggttagttctccctcctggtcaaaagcagccagggtttccccaattccgtatctcataacaacccagctgaaatactgttccgtcggttccagggtatctgcaaaactagttacaccgatgttcagttcccctccttttgccagggagacagtttctttcgtacttttatcttcggcttcctttgaagtactgtcacctccgcatccggtgaacccggatactgccatagcagccgcaagtcccacagcggccagcttcccataccattttttcattatttttctacctccaaatataatctatacttgcttctgtctgggatccagaatatctctcagactgtctcccagcatattaaatactacaacaacaatgacaatggccagccccgggtaaatcatcagccagggtgccttcgcaatatacgctctcccctcgttcagcataagcccccattccggtgtgggcgccgtagctccaaaccccagaaaggaaagtccggccagttcaagcatcatactgccgatgtctgtggcggctgttacagccatggtcgcaatcatattagggagcacataccgcaagagtatccttcctgtttttgtccccgttacttttgccgcttctatgtatacactgttttttatctttagcaccaggcttctggaaagtctggcatactttgtccaggttactgcactgatggcaacgactgcattaaacatactcggccccaatagccctgctatggcgatagccagcaccattcccggaaaagaaatcatcatatccgcaatgcgcataattatttcatccgtaatgcccccaaaatagcctgcaagtacccccaaaaaggtccctactgcaaaaaccaccatcaccaacataagtgtcatgcttaaagaagctctggtgccatagattacccgggatagtacatctcttcccattttgtccgctccccaggcataggaagctccaggtgctctcaaagagtctgtcattataggatccagcggatctttcggagcaatccacggggcaaatacagcaactccgataattgccagggcaagtatggaaaagatagtaaattgtttgtggtgctttataaaattccaggtctttttcactgcagtgcctccttcagtcttggatccagatggtgataagataaatcaaccagcagattgatggccatataaataagagcaatccacaaaacatagccctgaaccagaggataatctctggaagtaatggcactgactgccatatttcccatacccggccaggagaaaattagttcaaccactgccgtccctcccagcagattccccaaagaaagtcccagaagagtaaccaggggaagcattgcgttgggaagtacatgccgccagagaatagtcctctctttcatgccgcgcatgcgtgcccctgtcacatagtcctgatgtaattcttccagcacagcaatacgcacctgcctggtatactttgccgacatggcaaaggcaagggtaaatgcaggcagaagcaggtgtctccagtcagtaccgccccctgcaacaggcagccatccaagttttactccaaaaacgctcagcagtatcagtcccagccagaaatttgggatggagatgcccagaaaggtagttccccgtacgatatagtcaacaaatttattctgataataagcagcgaagattcctgccgggaccgatatcaccagcatgatggccagagatgtcagggacagtttcagtgtaggcaaaaggcaggacatcagtttgtcaaaaaccggtaccttcatggaataagacgtccccatgtcaccctgaatgatatttttcagccaggttccgtactgtatcagaaagggtttatccaggcccagctccgcccttgtcttttccagcagttccggagtaggaacatttccgcattccgtcagcataatctcagccggatcaccgggtgacaaataagtaagtccaaaggtaaaatagcttattccaaaaaggactatcacaatctgaatcaaccgttttacaatttgttttctgttcacatcagttcctccttctgcccggtcgccttcatctgtcaacggcgggtctcatcaacacttcatcaagcacagacatattttctcaaaaagaaaaagatgcagccaaaattagccgcatctaaccactgaaatataaatccgccgcagtctgcggcgtatgattcacacaaatagttacttatcgaccgtaagcaattacttcaactcaacaatataagcagttctcctgacttaggttcatagcttttcacaccttcccagagcatcctccagtggtatctttgtgaaaagctccccatcacagtggcgggaccgtaccggaatcgcaccggtttctcttttcatcctgttaggaacttatatctttattcatttaacatggtcaattataccataaaaagtataaatgtccagaaaataggtattccaatttgttataagtcaagttctgtatttactggtttaacgcacctttccaccacgtttgttctctcagaaatttattcagaaggaaaaacagaaggtacccgatgcacccgccaaaggtattcatgatcagatcatccacatccgcagaacgcccgataaaatattgtaatgtttcaatcccgaagataaacaccataacacataatgctgtcttccaccattttcttacggaagggaataccacgggcagaataaatcccaggggaaccagcataactgcgttcataaataattgttctatcattttggcaaaccccatgagataggtttcttttacccacacaaatgggacaaggtttaaaaaatgataccccggatgaaaggttatccctcccatgaaaacagtgacataaagaatactcaggattaccccgatgaagcaatagatagagagatgccgtacaacaggtctttttccatatttctttttgttatatatataagccggtagataaatcagaaaggatacaacggctgttattggaaacaccattagaacgtaaaaaataatcataggatatccctgccttctttcattagtacctgtatcacaggcctgtatagttcaagtgtaccaggtgtactaatataaatagtacacctggtacacttgaactatacacaatttattctgcagcgtcaagaaagcagagaaaatcttaaggatatattcagaaacttcagaatgtattaaaatacttttattataatatatttgtaagcagaacccaatattatggatctttcatttatcatatccgcacgcaaatagttaagacgtctccagagtaacttgctgatatagaaccacctattttttcaattaaggctttcgatatagacaaacctaaacctgttgattttcgggcattattcactgtatagaaacggtcaaataaccgttccacctgcacttccgttaaaccttgcgcatgatttgaaaataaaaattcaccattttcagtcagcgtgatgttcagatctccatcactatatttaacggcattgctcaatacatttcccaaaatacgggataaagcatactcatttcccttccgcaatatttttttatctgggatagatatctgtggaacaatatgattttgcttaagaatggaataatatacggatatactattctctaaaatcccgtttagtattactgtttccagcaccatgtcctctgtatctgatattgctaatgtataatgaaacaattcttctgtgagctgattcaaagcccgtgtgcggttttctattgccaaaagatacgttttcccagtcggtgaacattcttcgtttctcagcaatttcagatacccataaattgctgtcagaggtgttctgagatcgtgagatatattagtaatagcttcttttagttccaaatctccatattcatatttctgtctgctttggtataaatatttcagctgtgtattaagagcggaagctaattccttcatgtctttatcgtggctggatatttggataattgtatttgtatcagattttaacttttccgcaaaagagatgcggatttcccttgcagacttttttaaatagtaaattttaagtcccaatattataataataagcacaaatccaatcattacataatatatccagtctcccatacataactcctctttacttaatgtctttcttctgaaagaataccataccagtgattgttgcaatgcaggaaatagctgctaaacataacatttttaagtttaaatccccaaactgcatactcatatactgatatgcctggcccgagggtagataattaaataaaaatcccaacacagtacgttttacccctgtataataatctggcaaagaaagcatagaaccaatatatgcttctgtaaataaagacaaaaacgaagcaaccacacaaatggcaactgatattgctttgttatgacacagcatagaaaagaaagtataaatcgaacaatacgaagtaatcaataaaaaggaactgaagataatttttaaggcttggctgatttctatgcgtaatgagcccagaagaggcgtccccgcaacaagtattactagaatatatatgaaacacataaatgacacagctaaaatatttgtaattaaatttgaaagatacactttaaatcttgcatgacccacaattattttatttcttatagtgccgtcactatactctgtccctgcaaagaaactgacaaaaattgcacttattattcctgtgatgaaagcatagacaaatagtatatcatccaagttcaggtcttcgcctagctttacagacgatttatattctgtaagcattttgaatataccatagaggagcataaataatgaaccaaaccaaaaaagtttgtttttccataaacgtacaatgttggcgtgtaaaagattattcattatgagaacctcctatcaaattaatataatagctttccaggctttcatccagctcatgcatggataaaacctgacaattttctttttctaaagctaataccaaaacagaaatcggaatatccccataaacatttgcctgtgtatctgaaagtatatcatattcaaagttcattatgtctaaaacataagcaagaactgatgtctcagtcactgttacttgtgtacattttctgcaatttgtttccacttcctttgctgtaatttcttttagcatagttccattgtctataaatccatagtgtgttgctaatcttgacaattcatccaggatatgacttgaaattattactgtaatttggcgttcacgattcagcttcaaaataagttctctaatttcaataataccctgtggatctaacccatttattggctcgtctaacataagcatatcagggctgcctgccaatgcaagtgcaattcctaatctttgacgcatacctagagagaaatttttcgctttctttttccctgtattttctaatcctactaatttgagcaattctggtatatctgcaaaggaaggaagtcctaatatacgatattgctccttcagattatccgctgcagtcatatcaagataaatagatggagtttctacaacagcacctattcttctttgaacctctaaaattctcttatctgtattttgggttccgtataatgtgtaatttccagatgtgggtttttgaagaccgcatatcagtctgattacagtggttttaccagctccatttttacctactaacccgtagattgcccctttgggaacgtgcatagagagattgtttaatgctttgaagtgcctatattctttacacaagtgattcgtacttaacacatattccatagccgttcaccctccttggtttgttctatatttactgtcattctataagagaagtgttaagaaacctgtaaagaaaagtgcaaagaaactgtaaagctttacgattctgccatcttaaaacctattccccatactgcttcgatataatctttgccggttacctcccgcaatttctttcttaaattactaacatgtacgcgcagcgaactctccatacagtccggtgtgtcttcactgatgcggtcgagtataaccgtttttgtaagaatctgttttggattttccattaaaagctttaatatcgcaaattctgtcttcgttaattttacattgcgattagtaatttgaacctcatgcgtgtccaaatataaggtaatatcagcatagttcaatgtatgaacagggttacattttgaagtatccctaagctgtacaattatccttgccagcaattcatcaatttcaaaaggctttgtgatataatcggcagctccattcagcaaaagagccaccttatctttcacatcagctttcgcactcataacaattacaggaatatttactatttgggataacacttcttcaccagataatcctggcagcatcaaatctaataaaatcaaatcgggtttacaatttgacaaaaacagcaaagcttctgtgccggaataggcgtgataaactttgtatcctgcctgtgtcaaaatattatccaacatatcattaatgtgtacatcgtcatctataatcaaaatatgattcactacatttacctctattaatttcttaattttcttatcggctattctatcatattcctatctaacatccagtattttataaaaatgacgcagataatgtctccactacctacgccatttttccagtactatttcatcactaaattaataatcttctttggtacataaatttcttttataatatttccggttaacttatccgcaattgcttctttacccactgcaattgcttcttccttggagctttccgcgctgatgctgataactgccctggttttaccgttgatctgcacaggcacttcgatttcatcgtccttcatcgcattctcatctgcctttggccataaggtgtggaagacggagtctttgtggccatatgcttcccagagttcctctgtgagatggggtgcaaaaggagccagaagctgaataaacgtctcgatggtctctttgtcaatgcctcctgtcttttttgccagatcaataaatttattattgtactccataaagccggagataacggtgttcagactaaagctttccagacgctgggtaatgtcatataccagcttatggcgcagctttaccatttcctttgtctcagcgataccggcttctctgctgtccatggccagtttccagaaacggttcaggaaacggtatacaccgtcaatgcccctgtcatcccattccgcgtccagttccgggggacctacaaacagttcatacaggcggagagagtcacagccgtaatctctgaccagatcgtccggggatactacatttcctttggatttgctcatcttaattccgttctttccggttatcatcccctgattgaacagcttctggaatggctcatcaaagtcaatagctccaatgtcgtacaggaatttggtgtagaaacgtgaatacagcaagtggagcactgcatgttctacgcctccgatatacatatctacaggaaggtatttatctgccttttctttggagaccagttcattatcatttttattatctacataccgcaggaaataccaggaggaaccagcccactgaggcatagtattcgtctctcttttggcaggagccccgcatacagggcaggtagtattcacccactcgtcaatagctgccagaggcgattccccggtccctgtgggttcataggaatccacctcaggcagagtaagcggcagctggtcttccggaacaggaacattcccacagtgaggacaatggatgataggaatcggttctccccaataacgctgacgggaaaatacccagtcacgcagtttgtaattcactgttttcttcccaattcccatattttcaatcatcacaggagcttcctgtttcagaacagcggattccatgccattccattcgccggaattgatcatggttcccgaagcctctgtgtaagcctctgtcatatgctcgatttctttgccgtctttagcaataacctggacaatcggaatattgaattttgttgcaaactcaaagtcacggtcatcgtgggcaggtacgcacatgatggctccggttccgtaatctgcaagtacatagtcagagagccaaatcggagttttcgccccgttcaggggattgaccgcatagctgcctgtgaatacacctgtcttttctttgtcctgcagacgatccacgtttgatttcatagaagcatcgtagatatatttttcaaccgcttcctttgtctcggcagtcgcaagggaagctgccagcttgtgctccggagccagaaccataaaagtagcgccatgaagggtatccggtctggtggtgtacactgtaattttctcttctcttccttcaacggggaagtcaacctccgcgccataggatttgccaatccagtcagactgcatctttttaaccttttccggccagtccagtttgtccaaatcacttaaaaggcgatccgcatattttgtaatccgcagcatccactggcggagattctttttggtaacggtggcgccgcagcgctcacagcatccgttgacaacctcttcattcgccagtcctgtcttacaggacgggcaccagttgatagggaattccttttcataagccagaccttccttaaacattttcacaaaaatccactgggtccatttataaaaattgggatctgtggtatttacttccctgtcccagtcgtagatagcagcaatatcattgatctgctttttgatattcgcaacattctctgctgtggattttgcgggatgtacgcccatctttatggcataattctctgcgggaagtccaaaagcatcccatcccatgggatggatcagatagtatccctgcatcattttatagcggctccatacatcagagatcacgtagcctctccaatgcccaacatggaggccatttccggaaggatatgggaacatatccagacaataatatttgggcttctggccgtcatccacgtttaccggtttttcttcccagttctttctccacttctgctcaattgccttatgattataaggtgtagccatgtttctttcctcctacatatatgtgatttggtacaaaaaaccctcccgtgtctatgccctataagaccatagagacgaaagggttaacattccgtggtaccactctacttcatcccaaaggggatgcactcgttcttctgtaacgggaagttcccgccctggcctactgaaagtatatgttcagccagagaactctgaggcgagttgggagttcttcactgctgccttccacctgccggcagctctctgaaagctgagagactcttactgctcctcttctgcgtttttgtcttattgactaactgttattctacccagaacgggaaaatttgtcaaggggctgcaggaaattcctgttttactccatgatttgtatggtaaccgtcgtgccttcttccctggaggacgcatagctcatcttccatctgtgcagtttgattatatcataacacagggcaataccgaacccattgtctttgactgtctccccgggccaccgatggtttttgttcagatatctgagatcctcttcccctatctcttcaccatcattccagacagtaatgtatttgccctttccggtgagcttcacccgatcgcctgctctcttcccattggaaatcagattttgaaacagacattttattaggttcggatccccggtgacggaaataatgtcattctctatctcaagtccttcatagctttctttcagctcctgaaataaagtatctgcgtttatctccaaacagcggatgttgccttctctaaggtttcccatgatcaaaagtctgtccacccgttcggccagcgtgcgggcttcttttacaatctgctgtcctgcaaaaaaacgatcctcctcgcatatctttcccatctgcacatattgcccgtagccctggataacggtaagcggatttctcagctcatgggcaatatgattgaccggtttataaatttttttcatcgttatatagagcattgtaccaataatggctgcaagcataagactggcacaggcaaggccggcgagacgccatttttgttctttgtatacctgactgatatcctccatgtaaattatctcataagaattgccccgaatctcttctgtatcatggagcagcacatattttcggccgctgtatgttacaatatccgcgctgtatgcaaacttcagatcgtcgggaatataatttacaatactctttccgtctgcagagacagacatcctgacattccctgtgtaatatcctctgcagatatattttatctgttcattgatatccgccgtatcctcgaactctgagattgcataggcaaaccgctgttcacccataagggccatctctatccaccgctccaggtcattcttaaacagcacctgagacagacagaaaaggcctgtattcagtaccaacaaaaataacaggaaggtaatcagataattttttttccatagctgcatcttatacctccagacggtatccatacttaaagatagtttttatctgctgttccagccccaattttctcctgatgcgctgaatatgtacgtctacggttctgtcgtcaccgaagtaatcccttccccaggcaagatctagaagctgggctcttgagagtgctatatttttattaacaattaaagcctgcagaagctgaaactccctgttagtcagcaccacctctgttccccttcggtataccatatgttcttccaggttaacctgaagatccttcagacaaaatagtttctcttctttatgaaatctccgcaaaaccacctgcacccgcgcaatcagctcttccatagcaaatggttttaccatatagtcctctgctccgctgttcagtccgcgcacacggtcaggcacctgatccctcgcggtaacatagataacaggcagtccccctatctcttttatcacctgaaagccatccatgtccggcagattgacatccaataacaccaaatctatcctaaccccgccgtcctgcaccagccgcactccttcccgccctgtgtaggcctgaaggcaatgatgtcctgtcattgtcagtgtccgccggattaattcattaatccctctctcgtcttctacaattaatatttctgccacattgcttacctttccacgccgtcttttttcttttatttgggatgatctgaggtttcgtaagccaattccccgatcttaatcagatcttccagggataaatccgataccttcatctgtgaagcatccagcccaagggcatcacagtaatctttgattacctgtccgcctccgtcaaaggcgtagacgtcgctgatatacacctctaaagtaaagactccctcttttgcattctctgaaagaagggggttgtctcccaaatcctttttcagcgtcaatgcctcctcataatttctcatatctctggtgatgtctttcatcgtaaccgtctcgtagtccaatccgtaacgggtgcacacctcttttacaatctcctgatcctctaccacctcccggtacaaagtgctgtcataccagccccgataatagggaatctcctctctcacgccctcgttcagcgattccgaagcttcttccgccactctgcgctcggtaagattctggccatacacagccaggatccccgctgttccagtgactcccagagctgctgccgctgcaataataattaccttatgttttctccatctttctttcctcataagcagtcctccttgtatcctatctgttttttttcttcaattacagtgtacggaagacatattgcagacttattacaggagaagaaaaacatgcacttaattatcatttttcagaacctccatggataatatcagatagattctgtttttagggtcatccaaatccatacatagaaaacgtcggatccgccttagccgttccaaaaaagttgtccggtgaataaaaaggacttctgcagctctgcttgtattacacttttcccggtaatacgtttccagggtctgcaggtaaaaggtctggttctgcctgtcatattccttcatgcgcagaagaccttccggcaccagttcctttggggaaagactgcctgtgcagttgtaaatcatatagtccagactgtattcatcaaagacataataccatttcgtagggtctttcttttctcccgcctcaagcgctgccatcgcctgaagataagaagttctgatattgcggattcccttggccgcccttccttttccggtcttcagatagttctcccgaataaagatccgcaattgttcctctgccgagtccctgtgactgcccagcagagtttgattcactattgttaccaggcagtcttcatattccagcgcatatgcatactgaaatacatgctccacctgtgtacactggctcccgacaaagcggtactttttttccagctctgtaatcttcaaacagtaaacctgatagctatgatcctcttcccattgtaaagagtccattacatgctgaagactctctctgtgtgtttctatccctgttatcatacgtatcaagacagcggtcttttcctcctggttctgacgcagctgcatatagttctggtcataatacaggcagatatattctcccaggtattctaacaaaaagcggtcactgtcacgaaacggaacccggctttcctggagattgagaccaagcgtataattcccctcacaccgcactcggtagctgagattacggtatggcagaaatttactttgatacaggaatgccgagctgcttctccataatttttgaaattctttctcaaaacgaaaactgcacataacatcctggctgacggtatccgtatcctgctcttctgattccaaaccagttattgctaaaaaacggtaattttgatcacacaaaaacaagggattttcaaaaatccctctgcatgcatctatcatactttgtatacatttccgcttattgacacagctctgtaatttttcttcccaggcgttgtatttttcaaaaatctccataatgcggttcagatatgcctctgtcccctgtctggccgctgccaggacagtacccttccgggaggcctcagagagagaaagttcctccagtctgcctgtatatagcagacagcttccttttttcagctccggcatctgttccagtgtttcctttgaacctatatacaaatatccggcttccagagaatgctctccctggtacatacgtacctttgagagaagaggctttttaaagccatctccttctatgaagccaatcagcttgccttccagctcttcctttattatacatgcacttagtctcatccgtattctcaccttatcttatatctttctcaattatacttcctgatgccaaagctttcaacgtttttacttttcaatactacaaattgatgtgccatttatcaaaatccgctctgtattgcggatagaaaaaatagttaaaagcttctacaattataataaaaaacagatagggaggcagctgcatgaatgcaaaagaaaacctgattcgcacacttaccgtagaccatccccaatgggttcctgatatgctgaaggattttcgttatctgattggtcaggctgaaattggagaaatggaggaaaatgattatgactggttcggagttcattggacctcatccgccgacggacccggtatgcccgcccctactccgggcagagaagttttaaaggatatagccgattggaaaaactctgttgtatttccagatctggatgctgtagactgggatttcattgctgaaaagtggggagtactgaaggaccgggacacgattgcgaattattatctcattccccagggtatttttgaacggactcacgccctgatgggctttgagcaggcattgattgccttatatgaagaacccgaggcctatgaagagcttgtggaggccattacctgttataaaatcaagctataccagaagctgatagatcatatgggcgcagatgtcattgcacacagcgatgattttggcacacaaatcagtacttttatctcccctgcgatcttccgcaaactttttaagccccgactgaaacggattgcagatgcgattcatgagaagggatgcattgctattatgcacagctgcggaaaagtggatgccttggtggatgattttgcagagtgcggttttgacggttgggagccctgtatggtgtgcaatgatctggacagtcttgtagaaaaacatggacaccacttttccttcagcggagggctgaatgcccaggcactaaatgttccatctactacagaggaagatatacgggaagagcttcacaggcgaatcggacagctgggccgttttgggggctatataccggcttatgtattgctggaacccagattctataaggtctgttctgaggaaatcaaaaaatataaattaaggtaatttaaaaccggcgatatgctctcttttagaggcatatcgccggttatcttattctatcactattactgtattggcaggtgagccctcagaatattcaaaagaaatggtgtcaccaatatcataccctataatctgcggaaaatctacaaccggcacatcaaagattccatctttgccggtaagcgttatataaaaatgggaatttccgtcaataactgcctgggccatcttctctatggcgccgctgacctttagattatcacttcctccggcattggagatgcccatcccggacagcagcttcgtgtattgtttctgacactcggccacagtatcccctatggcaacattctgatatttctgtatattaaccatagcatactttttcaccagtcccgcctcatccttcagagccataaagtaagtaggctcattgctgatgtttaaaagaagagggaaggttgctttatatcccagattctgtacctgtccctgggcagagtccatagctgagtactcttccgcgccgcttaccggataatatctggtttccatggttctctggttcatgagcacaaaagcaacgttagaacgatctcctgtgacagaggtaataccggtatatacccatacatcgtcatccatagcaatataattaaacccttctgttgttttcagacatcccttctgtcctaatacactgttcaggaaaccatttttcaaagtaccgtgataattatacagctggatcagcagttcagccggatagacacggtctacccaagtcggacactcatccacgggaacgtccaccgtctccccggtaactgcgttgcacagcaccactctgccgatggtctggccgccaaacaagccgatattaaattttttcaccggacagatccagtacggcgtccctgtctcgtcgatctcaaaactcagctgatcgaacatgtacgtggggtagcggaaacgcaggtgtctgtaaatgtttctgttaaaatactcagacatagaatatttaatgccttcattcagcttgaccagttctgtattttgtgtggtcatatcaatggtaatataggctggaataccggccttttggttagtcagccacttaattggactggcatattccaaaggcgtcacacggacaggctttccctgataattgatctgagaatacagaacactcacctggaactgagaaaccatatctaccatgctccccattttacggttgcccagcaaaaccgcagaatccttgtccaggagaggaattctgtcgaaatctgcctgctcaatatcctctgtaaaatctccttcggtctgggtgattaatttctgatactttttggcatttacaatgggggaagaaagaacagatccaatcaggtaaacaactgcaatcagaatgattaccccaagaccaactttaataatcttgttttctttgatatctttgacgctgtgaaagctgcttcttctgcggagcccgtaaatcaccaggatcactgctaccaccgctgccaggaaaaaccagaatccgctctcgtggatattgattgccggcagtgtgacgtaataatagatgcccgctaaaatgataactgccagaacagctattatcttacttttttttgtactcatagtatagtctccttcttatgactttgattgttattctagcaactttccggggtaaattcaacggttttcgaaaaaaagaaggcaatcctcttcacagaagccggactgccttctcttgctctttctttaaaacagctttttaacctgcattagttatcttcagaatctgtcagatggctggctcttgcttcaatttccttctcctgtatatcggagggtgcctgctcatagcgggcaaattcataggagaagtcaccgcttccgccggtcatggatctgagatctgtggaatatccatagatagacagcatgggtacatctgcctcgataacctgattgccgttcttatccggattcatcccaagcacacggcctcttctcttgttgaggtcacccataacatcaccggtaaatctgtcaggaaccgtcactttcatggatacaataggctccagaagaaccggagacgcatccataaagccttttttaaatgccataatcgttgccatcttaaatgccatctcagaggagtctacggtatgataagagccgtcatacagaattgccttgactcccacaacaggatatgccgcaagagggcccttcagcacagattcctgcatacctttttccacagcagggaagtagttcttgggaactgcgcctcccacaacgatctgttcaaatacaaacggagtctccaggtctccggatggttcaaatttcatcttaacatgcccatactggccgtggccgccggactgttttttatacttgccttccacatccgacatcttgcggatggtttccctgaaaggtactttcggcttggtaagctcgatctccaccctgtactgctctttcagtttactctgaataatgtccagatgctgatcacccataccatagagaagcgtctggcggttggctgcatcatttactaccttcatggtgagatcttcctgcatcattttgccgaaggcctgggagatcttatccacatcacccttattctttgctttataacgtttgtaggtgtatggcaccgatatctcaggtttgccgtataccacaggagttgccttggttgccagtgagtcgccggtaactaaggtattggctttgccgatggcgccgatatctccggcatgaagctctggaacctcaatgggcttattgccttccaatacatataatttattcagtttctcttccgtgtctttttccacattatagagggtgtcatctgatttgataactcctgaacacactttaatcagagagtattttccgatgaacgggtctacaattgttttaaataccctggcggtttttgctttggcaaaatcgtaattggcctcatagatttcgtttgtcttcttgttgatgcctgccatctccctctgatccggtcctgggaagtatccgcagatatcgtccagcagattagacacaccctgcagattgatggtggaacccatacatacaggtacaatacttccgtcacaaacattcatcttaagagccgcagaaatctcagcaatggagaattcttctccgccgaaataccggtccatgaattcttcactgatctctgccacagattccataagtgtttccctgtatttgtccaggtattcctgagagtaatcgggcaccgggcactctgtttttttatctttttcaacatagcgccttccggcctgttttactacgtttacatatcctacaaatttgccgtcctcacggatagggaagtgtatcggtgcgattttctttccgtaaagctctgtcaaatcttcaaccacctggcgatagctgacatcatctacatccatttccgttacgaagaacatacggggaagtttatatttttcacataagtcccatgccttttgggtgccaacctgaacccctgactttccggagactactataatggcagcgcctgcagcacttacggcttcttccacttctcctacaaagtcaaaatatccgggggtatccagaatattaactttattcttgccccacacaatgggcactaatgatgtagaaatggaaaaatgacgtttgatttcttctttatcaaaatcgctgacagtattgccatcgtctaccttcccaaggcggtttgtaattcctgacaggtaagccattgcctctgttaaactagtctttccggcgcctccatgacccagcaggaccacatttcttattcggtctgttctaaaaacgtccatatgtaatacctcccatttattaatatgtgtatattttactaaaaaaaatgagataattcaagtaatttattcacttttaacaatgaatattcgattttctttcagaatcttctttatatatcttcgctttaaagcgcaacgctttaaagcaataaatcgttgacaattaccgacacttgctttacaataagaaaagcagtcagaaatgactcttacacctaaatgactgccgtacgatgagacccgtgcggacgcccatgggacacctgttgcgaaccgtcccgggggaattaaatgaatggaactaaagggagatatgaactatgattatcgttatgaaaccaaacgctacggattcggccatcaatgacgtcatacagagaattcaggaaaatggcctggaaacccacctgtcaaaaggaaaacaagttactatcatcggatgtgtgggagacaagacacgtctggcagacaaaaatatagaaatcatgccctatgtagacaagcttgtcccagttacagagagctataaactgacaaataagaagtttcatccctctccttcttcggtatctgtggacggatgggtcatcggcccggaaaccctcacaataatggcaggcccctgcgcggtggagacagaagaacagcttctggctatcgcacatgcagtaaaggaatcgggggctcagtttgtcaggggcggggcttacaaacccagaaccagcccatactctttccagggactggaggaagagggcctgaaatatatgcagacagcaaaaaaagaaaccggacttcgcacgatctgtgaagtaatcagtgaagaggctattaatgctgccgtaaagtatgtggatatgatacagatcggagcacgcaatatgcagaactttcagctgttgaaggaggccggaaagtccgggctgccggtacttttaaagcgaggcctcgccgctaccattgacgagtggctgaatgctgcggaatatatcatcgcagagggcaatcccaatgtagttctctgcgaaaggggcattcgtacctttgagactgctaccaggaatacgctggacatcagtgcggtgccagtattgaaggaaaaaacccacctgccggtcattgtagatcccagccatgcgaccggagtatacagctacgtgccgcctctggcaaaagctgccgtggcctgcggcgccgacggactaatgattgaagtgcacaacgatccggcacatgctatgtcagatggtccccagtctcttacctttgagaacttccgggaactttccgcggaattaaagccctatgtagcccttgcggggaggaaactgtaatggaacccgcagctgccggctttatcggcctgggactgatcggaggctccattgcaaaggcgctgaaaaagttttatccccaatgcagaatttatgcctatgacaaagatgaactgtccctgaaaaaggcgaaggaggaaggtatcgtagatatcatctgccgggagcaggacgccggaatcagtgagtgctctattattttcctgtgcgcaccagtttccgcaaatatttcttatctgagaagtctgaaatctatccttcgtccggaatgcattctcacggatgtaggaagcgtaaaaggagatattcacaaagttgtgaaggcactgaagctggaagagtattttatcggaggtcatcccatggcaggatctgagaagtcaggataccagaattcttcggatcatctgattgagaatgcctattttatccttactccctctgagggagtaagcctgcagaagatcagcgattattctgaattggtgaactcgctgggtgccattcctatgattctcacctgggaagaacatgattatatcacagcagcaatcagccatcttccccacgttgtggcatcgtctctggtgaatcttgtgcaacgtctggattcctctgaggagcatatgaaaatgattgccgccgggggatttaaagatattacaagaattgcctcctcttcccctgttatgtggcagcagatctgtcttaccaaccaggataacatttccagggtgctggatgaatatatccgtctgattgtgcaggcaaagtatctgatagatcagggagacagcgatggcctttaccagatgttttcggattccagagactacaggaattctttggattcctctcctctgggtcccatcaaaaagacttatattctctactgtgatattgtagatgagaccggcgccattgccaccatcgccacaactctggcaatggatcagattagtatcaaaaatattggcattgtacacaacagggagtttgaagaaggagttctcaagattgaattttatcaggaggatgccatgaccagtgcggcggaactcctgagaaaacgtaattatatcatttatgaaagataattttgtacttaggagggacttatgaatatcaagaaacttacctctcctcttcggggagaattgaatgtcccgggagataaatcgatttcccacagagccataatgctgggggcaatatcaatgggcactacctctgtcacgaactttcttcagggggctgactgcctttctaccatctcctgttttcgcaaaatgggtgtacctgtagagatggaaaaggaggagatcctggtgagagggaaagggctgcacggcctttccaggcctgacacagttttagatgtgggaaacagcggaaccactacacgtcttctggccggcatattggccgggcagaactttgacagtgagctcaccggggatgaatccatacaatcccggccgatgaaaagaattatacgcccccttacacagatgggggccggtattaccagcgtccggggcaacgggtgtgctcctctccatatagaaggacgcaccctaaagggaatccattatgactcacctgttgcatctgcacaggtaaaatcctgtttgcttcttgcaggactttatgcggatgacattaccagtgtcacggagccttatctctccagaaaccattcagagattatgctggattactttggagccaccctcactgcggaggataccacggtaactatctatccggacccgattctggaaggtcagaaagtatctgttcccggggatatctcatccgccgcctattttattggcgctgcccttctggtaccagggtcagagatattgatacgcaatgtaggggtgaatcctacccgaaacggtatcctgcgggtatgcgaaaaaatgggtggggatattacccttatgaatgtatctgcggaggaaggtgagcccactgccgatattctggtacgtcacagttctctccatggcattaccatagacggttccatcatcccctccctgatcgatgaggtacccgtgatcgcggtcttggccgcttttgcccagggtgaaactgtgataaaagatgcccaggaattaaaagtaaaggaatccaaccgtattgatgtggtggtcagcaatctaaaggctatgggagcagatgtcacggcaacagatgacggtatgataatccggggaggacagcccttaacaggcgcccttattgacacaaaaagggaccaccgaatcgccatgtcctttgcagtggccggactggcggccaagggagagacacaactttgcaacggagagtgtgtcaccatctcctaccccggattctatcaggatttggccgcgctctccagataaactgttttcgtcatatcagtccttctcagcgggaagggagtgctggtttccactcctctcccgcttttcagcgagaaatactgacagcatcttcgctataaagctaagcgcataaatctgatccttcagccagaatctttttattttacagtcatcgaagcctacaaatcccgcaaatgctccatttcttctgatttcgcactggagcagagactgaattccctgtgctttgaacatctcccgatacccctctgacagctgttccacatcgggacagtaaaatattccctcctcgttaaacagggccatatagcgctcccggcccccaagattgtcatacgcatagttctggagattcaccttctgagattctatcccatcattgcaccactcaaaggtattactggtgcttctcccgtccccgctgtcctcaaaaatataggtacggctcgccgcaaattctcttcctaccattttcaaaatacaggcaatcgcatcttccggggcaattgattcgtataaaatagtaaacgcattttcaatcagccggtacatcacctgtgccggtgctgtctctgattcgatccgggtgtttaccgttggcttaacggccggcatattgaatggacagttcaaaatagaaggggaataaaatgaatatgtattttttcctcttttttttgcatcatacagagccacatcactgtgatggaatagggtctcaaagtctgtgccgtcctctggatagctcccaatacctatgctgcaggaaggagtatacgatatagcattttcacggaacatccgatgggatgcctcaataattttacgtgcccttatacttaccgcctcttttggggcattttccataaagatcagaaactcgtctccacctatgcggcagataatatcctgatcccgaaacagctgaacaagttctccggcaaattcctgaagcacaacgtctccgaacatatgcccataggtatcgttgatcagcttaaaattatccaaatcaataatcatcatagcggccggggtccctttttctttaacattgagaagcccttcgattcgtttcctccctgagcttttattataaagctttgtcagtccatccctttgggcctcatccaaaaggatctgggaagcacgcttttcctcatcgatatctgtgactactcccactgtcttgaaggggcggcctgcactgtcaaattgggcagctgcccgaattttgcaccaccgatacctgccccctgcatctgccacccggaattctatctcagagtaaggaataccatttttcatatcatgaatcagctgcaaaaaacaggtctgatctttggggtgtaagtggggagcttttggaattttctttgttgcctcctccctgaccggctgatagccaaatttcttttcccaattatttgaataggagaccgtatcattttctatgtcccactcaaaaataatgtcgttggagcgctccataataatctggtgacgctccagcgtcagacgcagctcttcctgtgcttttttcagctgggtaatgtcaaccagaacataaaggaaatactcttcctccccgattctgctcatcaggcatcgtttgtccagtacccacaaaacagatccgtcttttgcagtgatacggtattccagttcagcaaagttaccttttgtcagctgttcctgtatctttgtatgtaccatatctctgtctttgggatatataaagttaagatacctgttctgaaactggttttgaatctcctcctctgtatatcccagaagttccttcagaccgctgttcatctgaagaattgtaaaccatttatcatttttgcaggtctgaacaccgcccagaaggctgtccagtactcccactgaaaatagcttatctctcttcctcccgtctctgggcagctctgtttcttccgctgcgcgtttatcccagataaccattgccttcctgctgtatggattattgacttcaatgcgtacaagtgtaaccatacaccaatagtatgcttcatttcccgagctgtatatcctgcatttcacgctgctttttctcaggccgtttacaaagaaatcctccatctctctgccgaaaaaggaaagcagctgcttttgttcttccgggtggacagattcctgaataaaatgcagaatggaattctcaaaccgtttgcctgttttcagtgtctcaaactctctgccggaggtatataccacatggtacacgccattgtccaaatccatttccattactgtggcatctgtatactgaagcattgcaaaatatttaagctgccccatctgtaaggtctcttcccgggaaaacagaaccggggaaattgttttaatatctgcagctttaggtgtatgtccgtctgcatactccctggtacactcctcaaaaaggcctttgacattcttcaggcattccagcagcctgggggaaaatgtcccgcattccccgtttaaaatcatattgaacgcatgctcaggagatattgcctttttatatacccggtctgtggtcaatgcgtcataacagtccgcaatgccgaccacctgggcacagataggaatactgtctcccctgagcccgtccggatacccctttccgtcccaccgctcatggtggtaacggcagatattgtacgcatactgcagataatctttatcgctcatcccgttcagattcgccagcatctcacatccttttgtggtgtgggtcttcattacagagaactcctcctgcgttaacttacccggtttattcaatattttatccggaatagcaatcttcccaatgtcatgcatggaagaggcgctgacgataatatcaatatttctctcattcagtccaaactcaggatacgaatatgccacattctctaacagtatttttgtgaaaatacggattctctgtatgtgctgtccggtttccacactacggtattcaatgatggaggaaagcgcatctatcataattgcattggattcccgcagtttcgctgcctgttcctcaatcagctcctgctgattcagccggtggagtgtcagctcaatgacattttgaactcttctttttaccacataaggttcaaaaggcttcataataatatcagaagcgcccagatcaaaagctttcacttcgttttccgtggaatcctccgcagtaataacaatcacagggagttcatccagaagatgttttctggccagctcttccattaccttatatccatccatcaccggcataaccagatccaacagaatgattacaatgctggaatgatactgtcttgcaagaatcacagcctgttctccatcctcagcctctaaaagattataatcatcctcaaatatatttctgaggattgcccgattcaattccatatcatcaacaattaatatagtatcttttttattcattcttttgttcccggggttctgcccgcactcctttatctcatctctcttcagcaagcccttgctttcagagccttcctcagctctgccttcagcctttccatatcaattggcttcgcaacatgggcattcatgccggcagccgcggatgcccggacatcttccgcaaatgcatttgctgtcatagcaataatggggattttccctgcatccgggtgttccatgctccgaatgacgcgggtagcttcgtaaccattcatttttggcatctgtatatccattaggatagcgtcataggtatgaggaggtgcctcgcgaaaagccttcactacctgttctccatcctttttgacaacagaatccgctccatagatccggagaagctcacataaaatctcagcattgattgcattatcttctgccaccagaaacagccggccggcgaactctttattactgtctcccgccgcatcatccgcccatatcctcacatcttctctgctgtccttcggttttgcgcactcgaactccagctccacctggaataccgtgccctcacaaagcctgctcctcacagatatctccccatgcatcagttccacaagcccctttgcaatgctaagcccaaggcctgtcccttcaatatgtacagtattgggacttctggtaaatggttcaaataaatgagccataaattcttcagacataccaagccctgtatcacttacagtgaaccgatagcgcactttaccgggagtctggatctgcagctcctctgtctcaaagtatacggttccgccctccggggtgaacttgactgcattgctcagtatattaagtaatatctgattcaggcgcagagcatccccataaaagccatcatggcagatcccctccgtccgtaccgtgaagttcagcctcccatcccttgcctggggagccataatagaggccagttcttccaccaattgggatacggatattctcatacggttcatggtgatctgggagcgttctatcttactcatatccagaatatcattcaccaggctgagcaaatgtttggaggagattgatatcttcttcagacagtcggcaaccctctctttatcatctaaatgtgccactgcaagtgcagtcattcccataatagcattcataggcgtacggatatcatggctcatagctgacaggaattcactttttgcctgattagcctctttggccaaaacaagcgcattctccagttccctctttgcttttctctccgctgccagcatatctgtcacatcagccctcacaagacataaggttctgtggttaacatctccccacataacgttgagctgtttatatcgctcctctttgtccttccggtaagaaaacagaaaatcatatcccccaggcttttcctgaagccgctccaggattgtagaaattcggaattgctctctggtatatttccaattttcctccggtacataatgttctgtgaagcttccgattgcctcatcgtaatgttccagaaaatagggcgataaattttgcagtaccgtctctcgggtatggagagtcagcctctggctgctcagatcgatgaatccagccagttcaaaggtataggcaatcacacggagcagcccctgctgttcccggatggaatcagtaatatctgttcttgacagacacacccggccaagcctgagatcgattgctgaaaccgtcatattctttgtacatatatctcctttgtcatctgttattgagaatgcaaaggtgtaagctccttcttttttcagacgctgtaccatcctgtctggctccagtgcgtctctgtacgcgtctttgtccctggggacaattttttccgccgccatataggaaacccgttctgaatgagaaccctgtctgggcggaaggcagcgggcattctcgctgctggataaaaccgtataagtgtcccgcagcagatcaacatccatgacacagtcatatcccgtaacagacaatctgcggagaatcatctcccggattctctgttctgtaatatctgccactgtcagtatgcctgtcacatcccctgtatcgggggtggagactagattcatcttgatctgaacgtgcctgcccctcttttcttttggaaatctcagaaagcagatcatcttctgttccgtttctcctctttcaaatgcttccagcgccggtttattcagataggtatccaaaaattgcctcttttggtcaggatcttccacaagatcggagatgccggtaaaaaactgttcacggtcactgccgaaggttttcagcaaatcagaatctgtgtaatctattatctccaggattttactcttcgtaatgttacagtgtccgacaatcagggcattgggatccggggtgcggtagtgctgcagaagcagttctttgtactgtgtccggaacttctcctgctcctcccgttctttggtcatgtcgtggtacactgcgtaaacacgcctttcaccgccttcattctggatcacagacaaactgttcttcacccaaacataaccatcccgcccctttttcaggcggtaggcgatctcccagtgggcagcgccgctgacaagataagaagtcatctgttccctcacaaaaaccttgtcctcgggatgtacaccctccatggcatccttgcggtaaagctcccaggcttcttccagcgtcatccccgtcataacggcaaaaccatccgaaagaaattccggtgtcatcgttccgtctctctcgtaacggaccacagcaacaccgccgggaagatttttcaccaccgtctggaaatactgttccagacgttccttttccctgcggatagttacttcctctgtgatatcacgcacaaacttaatataggccggtattccattccagactgtctcccggaatcgggtgctgtaataattgcttgtcccgtccacatgcatatcatgctcttccccgtccgccgtatgcgtcttgagagtacagaattcacaaggcccgctctttccgtgaagggccgtaaaacatttctgcccgaggatgttttctcctttggcaaacagacttttggactcattggcatagaggagatcataattctcttttccaatcacgtatatgccgtcagccatctcattggcaatgttctgaaacagatgcgtctctgcagacattccagtatataccgcatagaatcttgtggattcagagaggggacccatacggcgtccattcagatgtatccagatcagacttccatccttatggcgcatacggtaatagacatccatactctccccgctcacaagggctgcccgcgccgccgtaaaaaccctttccctgtccggttcatagataacagcaagtgcatcccggcataccagttctccgtattcttcccgcgtatggccggagagagctgcaaccccatcagaaaaaaaggtcggcagaaatcgattgccttccaccctgtagctggcaattccccctggaatcgaattgaccaggtgatccatttccagctgggcatctttaaggtctgaaatattgtgaaatacacagtgaagaagaggaaatccctcatcttctccaatccattttatccttacccgtacccagacaatatgaccgtctctgtgctgcttgcggaactcaaagttagtaaccccccggctcaatattacttctcttgccttggataccaccatagcagtatcctcccggtagatcatagttgccgcatcttgttttatcagttcccggtattcttccactgtatatcccgacagctccggtacgccgtcagagaaataaacagtttcaaacatgtctgaaaccctgtagatagcaactccccctggaattgcattgataatatcctgcattttttcatttgcctgtttcaaatcctgttccagccggatctgttcgtttacatcactgtatattgcatacagaagctttgttccgtcattctgcgctttcgccgagccatccagctgaatccatcggtattttttaagagtatcattccagacacggtaggtatgctggaggactccctcttccgcaatcatttttcgaattttctcttccagcagaggctggtcttccggatgtacccccagatatgccgtttcattctcaacagaacggatatgtgcaggggaatatcccataatttgataaaaggcaggattatgaaataccggtaaaatctttttcccagtaaaccggtacacactcagaccgcaggaaatgctgctgaaagttttctgcagttctcttttcagtgcttccgattccttttcctcttttttcttttctgtaatatctataatatattcaatatgggccggcctgccgtcccaatcgatccgctttccgctgagctgataggtccgttgattccccggatgctgaaattcccggacaaaaagctctgtccggctcatttgttctgcacggcaaaaaggacagggttcgtcgaatcctgccaggtaatagcaggtattcacctgcctgtctggtttccgtaaaaataacttcttagccattcgattggcaaaaagcagttcccagttatcgactgcactgacataaacagccaccggcatattgtccaatacagccgccgtctgttccctggatagagggctgtcctgtatcatatgattccccccttagatatgattcagttatttttagggtcattgcgtttttcagttctggttatagctctgtcctatatgtatcgtataattttagcacagaaacagaataggtgcaataaaaaaggttgccgccctctcaggcaatgtcattaagttaagctgacattgtgaaagaggcttccgacacaatcaaaacggatatatcattgagaagtggtatgtccgtttttgtatgttttgaagcatcaaaagagcacctatgcttaccatcataggcgataaatgtcttgtgcccatttttcatttatgttaatctgtagttgaaagcttttgctccctgcggatatactttgcggatataggtccttccttttctttctggaaggatgaaccgtgagagaagagcttgtaaatcaaaaggcggactgctgttgtgaattcggaaatactcaatacaaatcctgatagcctgagcaaagttaatcagatacctgtattttcggcacggctgctcaggtatcatcactttgcctgcaataagcaaactgaagttgtacatgattagacgtgcatagatttcctgcatagcacagtctgctttttttgtatgaaaagcagctaaacctacaacatgcttaagttctctaaaggaagtttcaattccccagcgaagattgtagatttcttttaagacgctaacagggaattctgattcaggaaggcttgttgcaaggacttcaaattctccagtatttaacgggaaactaacaaatctaataagcatttcatagtcgggatgcttacagtcagggataaaatcaaatcgcgactgctttgtcatatatttgtatttttctttatcgacagcatacggtcctgtggaatggcgcgtaataacgatattctttgtaatatcaaagggcttgccatcagggagctttaaccctgcaaacatgctgcggctttttgaagtacgcagtcttaccacataatcaaaaaagcgttcctccacatgagcaaagaagttgtagttttcataccccctgtcagcaacaatgatgacaggatactgatccggtaatcgatctgtcattgtaacaattgcagcggtttcattcgattcatgtttaccctggatgattgcatcaacatattgcctgctcataatatcaaacaatgcatttagatgaagcatagaacatttggactcaggaaaagcaaagggttctgagggattcagaggcaaagagatgtccgaaccgtcaacagcaagcagacgatattcccggaagaggttgatttcttcatgttttaaagaaaaacggcgaaaaagctcaaagaaagcctccggtttaattttctgacgctgttgaacaaatgcagaaacagaggggaaatctgaattgtagtgaaaatacttcaataattcctgacctaaagaagcgcttcccatggataagataaaacgcatgacagaagaaaaagtgaattttcgttgtcgtttaaaatctttgtccggattatgaacgaaacaatcaagctcgtagaattccatttcatcaatcattgaaagcagactatgttttaaattttcagcaaaagtattcatatgctgtacctcctcttctaagggctgcgccgcatatgagctgaaatttgtcaagtattttttttaaaacatacaaaaacggacataccacttctcaatgatatatccgttttgattgtgtcggaagcctctttcacaatgtcagcttaacttaatgacattgccctctcaggcggcaaccttttagccgacaaaacctccgtccacggagataacagcacctgtaatataagaactcatatcactggccagaaataagaatgcattggcaatgtcctgaggctttccaagcatctgaagcggaatacctgctgccagggactttacgacattttgatccagcgccgcaaccatatccgtttcaatgattccgggagccactgcattgacccggataccgtctttccccaattcccttgcaagagatttggtcagtccgttcacagcaaacttgctggtaggataggcacttccgatacgctgggcatacagactgaccatggagctggtgtttaatattacacctttcttcttatcccgcataatgggggccaccgccttagacatttcaaaaacagagcgtaaattaatggtcataacatcgttaaaatggtcccgttcataatcgtaaatagagcagttatcgctgactcccgcattgttgatcaacacatcaatgccgccgaactctctcttgatttcggaaactgttttttcaatttcttccggattagacagattggggtgatacccctttaccgtataagaagggttaatggctgccagtttctccagagcctgtgttacggtttcctctctggaaccaaaaagggcgaccttagctccctgcgctaagaaagcctgaacggtttcaaagccaatgccgcgggtaccgcctgtcacaattactaccttgtccttgagtgatgaaaatacgtttccgttttgcataagataaaactcctttttgttttatgttatcacaggagacaccgagggcacaaagaattcgccgtactcccatttatagaaatcttagggatacaaattccgggaatcagtcaagctcacatgactgcccggcagcagcttctcctaaagatttctcgcaagctcataggcattccagaccgcatacataatattgctgacatgttccgcgtctcccagaagatgtacatagggcatctcctccctcacctgttcgtaaaggttcttttcagatgcataccctaccgcacagattacagtatccgctgctactaccttatcgccctgaggcgttctgacggcacatccctctgccgatttgccggtgacacagcttccggtcaggacttccacgccgtggtaaacaagaagatctctgagcatatcactgttagcggagcaaagagggccgcctacacttaagatgtcaggctgcagttctacaatggtaacttccgttcccttctcctttttcagccaaagagctgtctcacagccaaccagcccccctccgattacaaccgtggaagcgccggcttctcttttaccggtcagaacctcctctgccgccagcagttccgccccgggaaccgacagcatctttggctttgaaccggtagcaaggataatttcatccgcaggcgactgcttcagttcctctggggaaacagcagtatttacttgtatgtgcacgcccagcatttttagctgcagttcgtaccagcggatcagtgcatggtcatcctccttaaaggagggtgcccctccgggaatcagattgccgcccaggtttggagatttctcatataaagtaacttcatggccccggagcgcactgactcttgcagcttccataccggcgacaccgccccctacgatccatatttgttttttatgaagagcaggcggtatgccgtactcattttccctgccgcaggcaggattcactgcacaggaaatctgtgcataagcagccagtctccccatacatccttcctggcaggacaggcatgggcgcacctgccggaattctccccgcataattttgttggggatatccggatctgccaggagaggtctgccgagggcaaccatgtctgtctgtttatttctcaccgcatcgctggccagatccggattctccatacgtcctgctgtgattaccggaatgtccactgcttgtttgagtatctcattatagggcaggtacatacccttctcatgatacatagggggatgattccagtaccaggagtcataagttcccacatccgcattcagggcatcataccccgcgtctgccagaattcttgcggcttcctttccctcctcaatatcacgtccggcctctgtgaattcttccccgggcagtccgccctttctccagtctttcacaaagcttttcaggctgtatctgagagagaccggatagtcctctccgcaggcttcctttatcgcctggacaatctctgtagcgaaacgaagcctgttaaccagggagccgccatattcgtctgttctgtggttataaaaggaaatagcaaactgatcgatcagatatccctcatggacggcatggatctctaccccgtcaaatcctgctcttttacagattgccgcagcttcagcaaactttttcacatatgtatgaatttcctccactgttagttccctgcagatgacatcatccagaaaccgatggggaatcggggacggagcaacagccacttttcctacaatgctgggtatactgacgcgtccgaatcctccggaaagctgggagaaaatctttgctccatacgcgtgtactctctctgtcattggttttgcagtctttatgaaattaagaggattgatggtaggacatggcattgacggcataacgcatttttctatatcattttccacatacgtgacacctgtcataatcagtccggtaccgccctgtgccctcctaacgtaatattctacccctttttggttataacatccctgctcgtcacagagacctcccggtcccataggagccataacataccggttttttatctttacttttcctatgctcacaggctcaaaaagaatcttatgcttttcttccatttagaatcatccctcactatatatgcagagtaattggttgcaaaaagactggatccatctttatcatttactatagcacataaagctcctttacctgcaagtcttaattgagaattctttaacaaataggaagccatagctctacataggtatgaagatgctgtccctcctcaacttctaccaggagaatctttccccaggggtttccttttaaatgaaatcctctctccccgatatatgctaagggcttttcaaagcatttctgaggagagtatacaaaatcttcttctgccttcacaatggtatgcacgcaggatgctgacgggatttcttttttgtccagatccacacaaagaagctcctcactgcagctctttgcagataccagatatccaaaacctgcttcatctccctctgccttttgaagcgccagacagacattcggcatatccttgacccatttctgggcttccatctgtttttttctgtcttttggaagccatcctcccgctttgtcctgtacaaaaataacagccggtgatttatcaaattcatacttacccgcaagactctcaatgagctccatactgcttagatgctgttctatatcggatgccagattccggtagaattctgccttctccaatgccttctcttttgccttctctactctcccttttattactctccagtcattttccctgccgctgaactgcgtgataatctgtttcatgggaatctccatagagcgatacttcatataggacagcaggcggaatacatcctcctcatcataataccggtgaccgtttttctctttaccggcgctgattagctgctccttttcgaaatagcggatggcgctggtggtaatccccagcatcttcgctatgtcagtaataccgtaatgcatattctttcctccccagctaaagctgctttagctgttcatttcccacagcctgttacagtatgggttgaatcactgccagatagcatttggccagttcctccggggactgtttcagcccatttcgaatccaccactgcaccatggtgacaaagcttcccgagatatgattcatcaaaaattcctccggaacctttgtattctttctctccatatgggtaagcagacatttttcaacaagctgattcagatattgcttgaaataggataaaaaaatctccccgctttcactgtttaaaatccccgtaatgttcctcttattgtccctgagatggtaaagaatatgagtaatcaccacatccggacttccctgtgtcaaagaaaagtcatgggtgctctccattcccagatgctctgagaatacatgtccgaacaaatccgtacacatctcccccaacagttcgtccttcgtctgaaaatgtgcgtagaacgtgctccgccctacattcgcctcatcgataatctcctgtacggtgatcttagtatagcttttctgggaaagcagcgtgccgaacgctgtaaaaatggcatctctggatttttgctgtcttcgatccatagtcatcctttcctgtacaaaaatatcaaattgttcggtatcatacaggcagacaacattgtttcttgattgactcgtctgtcctgacctataataatatcaaacacattgtaccatatcatataaagtgtactctataatttcttaaaaaacaagggttataaaggaggccgcctatgttaaaaaagctgtgtattctatgttccggatggaaaataactgttgtatccggcatttttctgcttttcagtctgtttctcatactaacaggaactaaaccttccctggatcctgcctggttaaccgtattcctttcaggatatcctcttctgtatcttgctctgaccagactgttttataaaaaatggatttcatctgcgctcttaatttccatcgccatggttgcttctctgtgcatcggagagctgtttgcggccggagaagttgcctttattatggcaatcggtgcaatcctggaagatatgaccgtaaaccgcgcgaaaaaagggctctcaagcctcatggcactggcacctgcagaaggccggagactgaaaaaggaacagggttcctggaaacaagagcttattcctgctgctcagattcggatcggtgatcttctccgcgtccttccaggtgaaaccataccggtggacggtgtcatcgtctccggcgatacctccgtagaccagtctgttataacaggggaatctatccccgccgacaaaggtacaggtgatgatgttttctgcggtaccctgaactgctttggctccattgacatggaagcaacctgtgtgggcaaagactcttctctccagaggcttatccggatggtaagggacgcagaagacagcaaagcacctatgcagcggattgccgaccagtggtctgtatggctggtacccatcgcccttctcatcgcagcgggtacctttgctgtaaatctctcccttggccttcctgtgatggctgccctgaaccggggggtaaccgttctcgtcgtcttctgtccctgcgcccttgccctggcagcccccacctccgttgtggcagctatcggccaggccacgaaacagggagtaattattaagtccggagaagctctggaagcaatggggaaggtggataccattgcctttgacaaaacaggaaccctcaccctgggaaaattggaagtcagcgacgttattccattttcggatgccctggataagcaaacccttctggccattgcagcctcagcagaggcaagaagtgagcatccgctgggaaaagccatcgccgcatatgcagaggaaaggggaatatctctctggagctctgagaactttcatatggaacccggaaaaggaatttcctctgaagtctcgggaaaaaccatatactgcggcagcccaaactatttgtcagaacacagaattcagctctcttctaaagaaaaaaagatattggagcagcttggcgcacagggaaaagctgccgtacttgtggctgatagggattcctgtctgggcgttcttgctctctttgatgtgatgcgtccatctgtccggagcatggtgtgccggctcaccaaaatggatacagagaccatcctgctaagcggagacaaccggaaagcggctctttactttgggcagcaggcaggcatcaaatccgtcctgggagaattgcttccggaagagaaggtgggttacatttcacagcttaagcaaaaagggcggacggtctgcatgattggagacgggataaacgatgctcccgcccttaaaacagccgatgtaggggtggccatgggcagtatgggcagcgatattgccgtagaggctgccgatattgccctcatgagtgatgatatctctaagattccttatctgaagcgcctcgcccgttccacactccgtaccattaagggaaatattgccgcatccatgtgcattaatgctgctgccgtcacactttctgcttttggagtactgaatccagttacaggggccctggtgcacaatgcaggttctgttttagtagtcctcaatgccgcactgctctatgacagaaagtttccgtagcaattccactggaaaaccaccgtcccctctctatgtgggatggtggtttactgtgatgcccttctgttattttctgctaaaaaacgctccatatcgtcctcagacaggggtctggaataataatagccctggatctgatcaatccccgcatggatcgcagactttacctgctcttctgtctctaccccctctgccacaaccttcatattcagggccttaaatgtatttacaatatgtttgattgcagcagctgacgttatattgccggtagatgcccacatgatgctcttgtcaatcttgatcgtaccaaagggaatactgataaccgtggcaaagtttgaatagccggttccaaaatcatccaatcccatcttaatcccgtacttatccatttcagaggcaaattctgtaacaatctgcgggctgtcggcaagcgtgctctctgtgaattctatctttatggctgaggcaggggttttattccgttttatgatccccagaaccctttcctgaagatccggctgtgaaaactgtacgccggaaaaattcacatgaatagaacccaccggaatctctttatccagaagacggttaataaacttacatactttatccaagatcacataggtaatatctatgataagtcctgtctcctcagcgatggggataaactctgaggggtatataggccctataggcgattcattaatacgcataagggattctgcaaatttgaaatccccttctttcacagaataaataggctgatagtacatctcaaagctctggtctgccagcttatccttcagtatccggacaatttctccccttcttctcagctcccccagcattgctttatcgcaatgacagaccgtaccatacttcccggatttagcctgggagacggcatattctatagcgttaattacattctccagcgtggagtccacatcagatcgacgaatgatccctatgaccacctccggatcaagccggtagtcatccagctgccagggcttagtcatacgttcctctacagcttttacacagcgaataaccatttcatcactttcatgagtaaacagaattgcgaactcatctccgctgaaccgatataccctgccggccggaccaaatctgcagagaaatctcccaaattcctgaaggaacctatccccccgctgctgcccgcaggtattattaatatgccggaattccctgagagatacgacgatcagcgtgaacggctcccctgcagatctctttaatatcagttcaagcatgtccagaagctcccgccggtttggcaaatttgtcagataatccagggaaatctgtttgttctgaatatgcagataaataataagcagcgcgcaggttgccgccgacccggacagtattatattcggatacatctgctgaactatgattaccaaaaccgccagcaccggaaaggcggcaagtattctgcgtatctttcggtctgttcttctataattaacaactgttattattatgcttgccacacagtaagcataaaaaataatataggttgccacaatataacggcccctgacataaccgccttcaaccgtgatattaaatatgttctttgtgagagggttcataaagacaattaccgagtataccgctccgggtataaggctcattccaagaatacgattcaggacccgtccctctgggtacagaatggaaacggcatagaaaaaatatgccattcccataagcggtgtcataataaagtaaaccgtggtcactgtccaggtaagccatatagggaccgcatcgctgcgataaatcataattgttgacaggatattcgtcagcatagccccgaaggtaaccagtaagcaccactgaaaaatcctgttttttaaagtcggaagtaagcttccacttctggaataaacccatataattaccagaatgaccagggaaatagcctccggcgcaatattccactccaaattctccacctgctgtctttcgaataacgaatccagtcttatcctttccatacgcctatatggatagtataacatacaaatctggttttcgcgaccttatcccgtcgtcaaaccccaacccgaccgtcccccctttccagaattctgcaggaatcatcttgcattcacctggtatttttggtatagtttccctcctgcggcagccaaaagaactgacattacggtgtatgctatggctgcagactgataatttgtcaactgcttccccagaacagaaaggagtcttccgtcccacaactgcccttttatcagcagtgttgtgggcagaagatcgtagagctgtgacggaatcttcagccaatacggaatgtcgactagcattgtgaataccatgcctcccgctaacacacccataactgcggcactgttttttaaccattcagatagaaacatcgttactatgctataaagtatagatacgatgataaataatacaaacagagtcataactgctttgccaacactcacaggccgtgaagataacggcagcactacttgaagagctgcatgaaatccatcggatccatagatgagaatgcttgtaatagcactcactgaaaaaagcaggactgcaaaaatcatgccaaaagttatgcctgcaagaatcttagcataatataggttctttctgccacaccgggtgcacagaataagctgatctgtcctgcgtatatgttccatagaaaaaacatttgagaggcaaactgcaattaacagtaacagcataaaattcagcgcataaatattgtcaaacacatctgcccatccatctgcatatgcaaagataaatggagtttctatctctttttcctttccaagccaatatgtgatttcctcctctgtcagcatttgctccctccaaatccgggtaaggttattccttcgggcgctgtacaaagcagcctcgtctgcagtcaatgcttctttgctgtcacctgttgttttctgcacataagaatagacagcgacatatttgtctgcactcccttctgcttcctgcatttccgaaagcaggatattgtctatagctcttccggacaagtctctcgcatattctctgttcattttcatcatctcatatccgctgatttcttccccatcatcggtaatataggaaactctcagcagattactcaaactaatgcccgcgcaaagaactaatgtaactgcacatgcaatccataccatcctccgatgcaggatctttttaagttcaaaaaaatataaagcacctgtcttattcatcttccacttcctcaaactgttgtaaatagaattcctctaagtctttccggcttccgtcccagctgccctgaaaaatcagctgtccgtcattcatgatcagtacggtatctgctatatgttcaatatctgagacaatatgcgtagagagcagaacaatactctctttgcccagttcacgaatcaagttccgaaaccggacccgctcttttgggtcaagtcccgcagtaggttcatccagtataagaatccggggtacatttatcaatgcctgggctattcccagccgctgcttcataccgccggaatatgttttgatttttttgcctgcagcctcctgcaaagatactacttttactaattcctgagccctgcgcttagcctggagttttggcaaacctttcagagcggccagatagagcaaaaagtccattcccgtaaagtcaggatagtagccaaaatcctgtggcagatatcccagattcgaacggtattcctcggtcgacacatcaactccatgaaaagttatggttccgctggtgggttttaaaactccgcagatcattcgcattaatgttgttttccctgccccgttagctcccagcaggccgtagacgcctttgtaaagctttaacgaaatacggtcaactgcaattttattctgatattgttttgatactctgtctatgataagctccatgtcagttcctccgtctgttgaatcatctttgttatcccctttattgtgagtgcggctaacagcaggaaagctgctatccaccaatgaaagcatctcacatggaagagttccggcagcatggtttgaatgaacagattcgttccgctgacagcaccggccgcccccatgcagctgtagacagcttctcttccctgaaatttccttactatccaaagcccggataccgttgtcagtaaataaggcactagaagatatacgcctgcctgtaaaatagtggctgtgttattcctatttccaagtgggatcagcaaacacagcaggacaagatgaaccatctccaaaatccccatgcgggcaagcacaacgctcctcagggaaaacctggacgccatctccagctcagccatatcataaatctttgatctgccgctttctgttgcaatagataatgccaaaaatggaaggagagacgaaatcagccatagaatatcccgatccataaaacatgcgcccagcaaagatacggcaaataaacctatggataccgcccaggtccatttttgaatatatcctgcctgtgagatcataaaagaaatagtacttattgcaggctggggtatggttctgaaaaactcttctttgtgctgaggcgcgggagcctcaaaggcatcctgcaaagcctttctcctatcttgtttcacaaaaactcctccttttccagtagctcctgtaattgtttcagcgcctttgttgtttttctatatactgcaaatcttgacatcttaaaaattttgcagatgctcatcacaggtacttcattgacatagcgaagaagcagaagctcacgttcctcctccgttagcagggataacgcttttttaagagaaatagcagtgagaagcttctcctcaagatcaacatctgcccaatcatcatgcagttcttctgttatttttcgcttccggtattcatcaatacataagttgcgggcaatggtatacagatactgtaaggcacgtcccctgtcccggtatccttcattttctaaaaaccgaagaaacgtttcctgggtgacatcctccgctgcttcccgctgatgcagcctatagtagcagtagcggtatatcttgtcatactgttcttctaagtccatggacacggccgggaaacctcctttcactatgtataacgtaggaaccgggccggatgtgcggcaaattgagatgttttgattattcattatacttaaaataaacggtgcagggaagttatccccacaccgctatatttgcgaaggttcttcaaaactaacgtgacccgacagacttcttccaaacgcgagcatttcaaactctggggccggcacgggcttggagaatacatagccctgcactaaatcgtagcggattttgcgcaaaaattccagctgtgaaacagtctccaccccctcagacacagtgagcatattcagccgcctgcccagttctaccgccattgctattacatcatgagccctgtccccctcacggccgggcttccagaacgccttgtccagcttaagagaatcaacgtggatgtccgtgagcatactaagagaggaataaccgcttccaaaatcatccatggcacacagaaatccggcctcatggattttgctgattacctcgatcagtccatcgacattctcaaagaacatagactccgtcagctcgatttccagaagagctccggggacatgatatttctgtgcaatcgccttgtactgttttagaaaatccggatctccgagatgggcccgggacatattcactgatataggaattggttccacaccgctgtccatccagctgcggagcagagcgcaggtcctttcaaatacatacaagtccagcttgacaataaaaccatttttctcaaaaaagggatgaagtcccccggcatcatgaaaccgccctccctggtctgccagcgaaccaacgcttcggcgcctttgaccgtattgtgttccggctcaattttaggctgaaggaataccgtgaattccccctcacgcagtgcgtcctccatccggttctctatatccttttcttttatcatctgctggcgttccatatcactataaaacacaaaggagaagagttctccgtaagatcgctttgcgttttttctggcgatattagctctgtcgcggatctgcaccaacgaaagattcaggtcatccacaagtactatgccaccgtctcctgctccatatattccacagcgatcattgctgtacctttgctaataagggcaaggaggtgtaccgcactcaaaaatgtcatggcttccgaagtggatgtactgcctttgattacaaattggcgggtatgcgcattctctcgggtaaccagataaccgccccgaagattcattttcctcacaagtccaatcttctccattgactccatcaccttgcctactgtataggcagaaatattatattctttgcatagctgggagcaggttggcaagtaggtgccctccccataaacgcccatacttatcttttggataatgcttcttgttacctgcgtatgggttttcagcctccccttttccgcattccagaaataagcctcctgctgaggcttttctaataaaaacgcagatgctatttcgtcaaaatattggtcggatagcttcgctgatttgtgatacatattgctgataaatgcatagataccatcgtaatcttgagatgagatgcagtcaaaaaaacagtgaaaagcctgttccccattagctgataactctttgtaaggattctcaaaacctgggataagcataatctgcgcactcaagtcgaaatcagcacataaatcctgcagcaggtcgttgtgaaatacggatttaatcctctggagaggtactaccgatttgcgccactgctctttggtattcagctcattcatcccctcaatatcatccctgcaggcccgaagcacttgggggtcacagtgtctgctggcttccgcgtagattggcggcatgatatacgcaagaatctttaggatggcacataccttgtctctcctcgtcaacatcatctcagcctgctgttcgtcatcggctgtcattcgataagctgcctttatgtgagaacgctgaacagcctctacatatccttctttcaccagtgcgtccataacatcacggacggttctgatgcctacatggtatatgtcgcacagtgcgcgcagaggcggcagcttctcgccataggctatccttccgcttacaatttgctgtaccaacgtatcgtgaagaaaattgaacagggtgggttttggttccatgaattacctccatataagacgcccagacaggagcgcagttccgagctttcagcggcagtcggccatctgtttatacctcgttttactctatctgttagtataccatggccccacgctttgggtctagtatgatatcccactgttccttcacaagaacaaccagcaatgcaatcaaccttttgcaaagtggagtttttgactctggagataattcatggggtatgctattatagaaatagcaaagagaggtgatgttttgaaacaaatatcccctttggaaagggcaatcgaatatatagaaaaccatctgaatgaaaatatcggtttaagcgatgtgtcaagagagacgggctactcttactaccatatgacccggctgttttcttccgtattgggggaatctgtcggccgctacatcaatcggcgcagactgtataacgccgcggaaaaactcattcactctgaccagcgggtcattgatatcgcccttgattgtggtttcgaatcctcagaggctttcagccgggcattcaagttagcctttggcagcagcccgacggcttaccgaaaagcgggacttgacctggtggtgaacgcgaagaggaaattagctcctgtggatgtgggccatattgcggacaacatatcacgctcgcctgaattggtgatgctgaaagaaaccagggtggctggcctccggggaacgacctctctttttgataaccggcttccgggattgtgggaggagttcatgcgtctccataaagacctgtttgtgaccgccggcgcagggtacggcatttgtgaaacacaacagaccgtctatacaaaagacggtgacgtaatgtttgcagccatggtggaagcccagtgaatacttttgatgatctgccgctattcttaccattggatacaaagatcctgcgtgcaggaaagtttgcggttttcacccaccggggcacctttgctaacctgttcaaaacgtatcagtacatctttggaacatggctgccggcagcaaaagaagaactagacgaccgtgaagactttgaggtttatgagcgagaggtgtctacattcgacgcccccgacaatgaggtaaaaatttatattccgataaaatgattacaaaatggcctggaggagtatagaatgactcttgcagctataaaaagaatatattatctgttactgtcaggccatgcaatctctcaaccatatcgccgcccaaaacgtatttcggcttgaacatctggatggtgcggaactcccccgcccaacgctgctgccgcttactataattacctattaaacttgtatgaatatacgggaagtagtgcaaaatacactctttttaaggtcgattccacaaacagtcttctggtctattatatcttaatataatagtttcggttatctttctacagagttctattcagattctatatgatcagcattgcatctccaaatgaaaaaaacctgtatttttccttcaccgcttcctcataagctgccataatatgttctttccctgccagagcagaaaccaacataaggagtgtggattccggaagatgaaaatttgtaatcaaaccgtcaatcaccttaaactgatatcccggataaataaagatatctgtccatccgctctgcgctctcagtattccgtcctcccctgccgctgattccagggtacggcagctggtcgttcccacagatattactttatttccccgttttttcgcatcgttgatgagctttgcctgctcctcctccactacataaaattcagaatgcatgtggtgctgggtcacatcctccaccttcaccggacggaaggtccccagcccaacatgaagagttacatgagcaatatgcactccctttttttcaatctcctccagcagtgattccgtaaaatgcagccctgccgtaggtgcggctgcagatccctcatgtttggcatacacggtctggtaacgctctttgtccttaagcttatgcgtaatataagggggcagaggcatctcacccaggcgatccaggatctcctcaaagattccgtcgtatgtgaagcgaatcaggcggtttccctcctccacaatgtcaattacttcacccatcaatattccgtctccaaacgaaatcctggtgcctatttttgctttctttccgggctttaccagggtctcccacacatcgtccggctttctcttgagcagaagaatctcaattcctgcctccgttccctcttttgttccgtatagtctggccggaatcacccttgtgtcattgattacgaggcagtcccccggattcaggtactgaaccacgtctttaaaggttctatgttcaatctctcctgtgacaggatccagatgcagcagtctggaggccgaacggtcctccaggggatcctgggcgattagctcctgcggtaaatcataataaaaatctgatgtcttcataccaacttcctttctctatgcaaagcatattcagtataacaccattaaaaggcggattcaatatttctttgaatccgccttatgggagcacagtcagatgcggaaggtttcactcctcaagctgcattctcacgatagaaatcaaactaagaaccgcagtaatcgtctgtgtaatcccagaagaaaagtcgtggatgatcagagaatacacagcccatatcacaacattcacaaagaaacttatcttaattgcttttaatctctgtgcgtaataattgctaaatgtaatctgaacggttgctatgacaggcagtaatcctaaaagccctctgttgttaaccgcaatgccgcaaattatgacaagagcagtacaaacaaccatcattcttttatcaaatttgccctttattaccaagatatttcttataatggaaagaaacaaagtggacactcccgcccatgccccgaaaaagaatgaggagatgaaaagagttgcgctctccatcagctgaaaaaaatacgccttttttctggtatttacacagcagcttactgcgagaaaaaccgcgcccacaaaagatatgacattgcctataacaatccgttccatacttcctcctatcttaggtcttacgcaagataagtattcttatactcttcccgtatatcttccggcaccagactcccgcctgtagcccaggctatatgggaagcctgatccattttctctgtaagttgatgcgccgtcaggtattcctttgtctcaggatactgcagcactctggccggtccctggaaggcagcacaggcactgggttccagaaaaatatcttcagagtccaggaggagacgcatatagtcatacagcagactgtccttcacagtaaaaattcccgaaaggaggggtttcatcactcctcccacaaatcccgaaggacgccccacagccagaccgtctgcgtgtgtaagaccggtcagacccaaatcctgtaccgagatcccgctgttcagaccagaggccatgcctgccagcatgcagggggcctgtgttggctctacaaaaaaacagtgcacaaagtccccgaacatatgcttcagtccaaaggatacccctcccggtgcgcctcccactccgcagggaatatacacaaacaggggatgttctttgtccacacttaccttctgctcctcaagctgccccaccagacgttttgccgctactgcatatcccaaaaacagattcctggaattctcatcgtccacaaagtaactcttgggattagcatcggaaagctttctgccgtttttcactgcctcactataatccgacgcatattccatcaccgtgactcccctggatctcagcaggtcctttttccactgttttgcgtccgcagacatatgtacgattacttcataaccgattgcggcactcatgatccctatactcatacccagattccctgtggaaccaacctgtatggtatatcctctgaaaaatgctttattttcttccgaagccaggatctcataagagtctccttcttttaaaatgccatgctctgccgccaaatcttctgtatgcttcagcacttcatatataccgcctctggccttcactgaacctgcaatagccagatggctgtcctgttttaaaaagagccttcccggcagatgactgtgatacgcttcgttcagcgccttctgcatttcgggtattggagttaacacagattcaatcaggccgtttctgggctttgtctcaggaaaacacttcatgataaaaggtgcaaaacgctccagtcttctctcagcatcctcaatatcgtccattgtaagttctaattcaggttttgcagtggcaaattccgtaagatccggattgatccatacgagttcctcttcccttgcagcacgcctcagaaccggtacggcttctgctgcttcctttatcttttcattgttaagcatcacttgtctcctccttattcatcattttatgtttctgtacatacgctgccggcgtcatccctgcatattgtttaaaatacttataaaaattattgagattgggatacccgcatcgctctgcggcctcctgaatgttcagactttcctcctccaacagaagctttgccttttctatcctgaccttgtgaatataggaaagtatggtgtaccccatatatcttttaaacagccttgctatatggctttctccgcagaaggtttcccgtgagaggtcttccagctctatcttttcgttgtaatgctggtggatatatgccagtatttgattcaccgtagaattgtccgtaaaattccagccaatcgcccttgtgacagctgcccgaagctgctccagctctataggcttggcaatgatatcagacacatccatgcgcagagccctctgggcatactcaaaagatccgtaagctgtgataataatcactttgctgtttgataccctctgaagcacttcaaatccatccatataaggcatctgaatgtccataaaaatcaaatccggcttttccctctgtatcagctccagcgcctgtctcccgtcctctgcagtacctaccagccgaatagggagatgttcctgctggataaaataagagataatcgttaatgccgccttttcgtcgtcacagataacagcacgtatcatacttcgtcctcctctgatacaggctggaacggaatatccagataaaactctgccccgttttcccaggacctcatttccatccggaaatcctccccatatatgacagacagtttctggtaaaccatggaaagtccatgggaggtgttgcttttcattccgagattcacagactggcatatccttttatccggaatcttcccgctgttcataatttttatgattacccgctctttactgcagtaagcctgcagatacagactcttattggaagtagatttgaacccgtgggtaaatgcattttctacaataggctgaaggaagttaaaaggtaccctgcacgtctgaacctttggctcaatgtcatacacaacagagagggtatcttcgtatctcagtttctgcagttttagataagaattcaaatactcgaattcctgcctccagcttacaacagtatcctctgttctgagcgtatagtggaacaatttggacaggtcaatgatggactgataaagctttggcagccctccgtcaagtgccatggatgccatgctgtttaatgtattaaacaaaaagtgattgcttatcttcaggttcgtcatagcatattcagcctccctgagacttttagccagcagctgctgggatgccagcccgtcataaatctgaagttcctgctctgccagccgttttctgaactgatcgaattcacagaaattgcggatcgcttttgtaattcttctgagaagattttttattccctgtaccgtgctttccggcgtatcatacacaccgtaagcctgatggtcgggtgtctgtgatcggcgcacgaatcctcccttaatatatcccagataatatcccttataggagacaggcattgcgtatacttccatgtcatgggtacagtgatacgtctgttccatacgcagccgctctttgctgttgggaaccaaacagggagccgctccgtagtacagtgaggggttacagcactcctggcagtacgtaggaaaatatttgctcttaagcacaagcgtattgtccctgtcgaaaatagcataggcatagtacatgttttccagaaactgtgtccgaatcgcctccacagccgtatagaacatttcttttgcctctaccggcatcagcagtttttcctctttcccccatgggttcataataatctcctcatccaggctttccggatttgatacaagaagatgccgaatgggttcatctccggtattcataatttcatgaatcacccctgccggccagtggaaggtgtctcccggcttcaggaggcattcctgtccgtcaatcttattcagcccaaccccctgaagaaaatgaactacctgctcttcataatgtacatgtgccggctggtgggttcctggctccacagttacgatccccacattcatcttaaaccgggaggatccttcctggttcatctgcagccattgaacatctccccaatctgtcttttgtgtacccatactttcctcctgtatacacgatacgtatgatatcttttttattcttatacttaccttatacgattcagggaaatctgtcaaacatactccgggaaataggatcatttttgacaattctattatcctatatatcaagaaaaaataatatgaccaaatttgatttttctttttccaattttgtcttttttcctgcataagacatgaaaacagaagcagccggtcttctgcccggctgcttctgtatccttaacaataaaccgcatcttccacaattaattttgccacacccttatgtgcctccacaatattaaccccacagttaggaggtacttttccgtgccagaaatcatcccccgggggatagacattctgaagcagagcgcgcactgcacagccgtgggatgcaatcagaatcgttttatcctcataatcggatctgtgaatcatttcctgaaaaaaatcacgggtccgctttactacatctgagatccgctctcccctttcagggggttgatatctttctgtgtggtgaaaaaagttatccagcatctcccctggaatttccattgcgtcggggcggcagcaccggccctcccaaaccccaaaggtaatttcctgtatcctctcatcctcaatcataggaatattccgtcctctgagaatcaggccggcggtttcctttgccctttgaagcgggctggtgtagcagatgtcaaaaggaacctcccgcaaagcttccccggttttctctgcggcaagaatccccttttcgttcaaggggatatccgaggttccctgcagcttaaactttacattccatggagtttccccatggcgcacaatatataatttcatgggattcacctacttacgcagttcaatgccgagagcttccaatccgttcaaaatctttttcattgccgaggtaacatccgcctcttccaatgtcttgtcttttgcccggaatgttacggaataggcaattgacttaaagccttctttaatctggcttccctcatagatatcaaacaggtggtaactttccagatgctttccgcctctctgaattatcacatgttcaatctctcccgcagtgatagcctttggtacgaccatactgatgtcacggctgacagcgggatatttggcaattcctgtatatttccggtcaaaggtagccattggaagaatatccagaatatccagcacagctacataagctctctctccaataccgtaagctgctgccacggcagggtgcacctctcccagaaagcctacttttactccatcatagtagatatctgcctggcggccaggatgcagatatggctttttgtcctcaggagaatattcttccttcttatgcatacctatcttatcaaagaactcctctgccatacctttcatggtaaagaagtcgccctcgccatacatacccagggtaaacatcatccgttcttccggaagttccgtaagaggcagctgtttcggcagataaatatttcctaactcatacagttttacattcttatttctgcgtttatagtttgtccccagggaagtcagcataccgtttaatgagattgtacgcataatactgaaatcctcccccagtgggttcattattgtaacggcctggcgaagagggctgtcctcaggtattctcagcttgtcaaataccttagggctttcaaaggaataacacatcccctgagaaaatccgttgcattcggccatatccctggccacttcctctatgcgcagcttaaagggaagttttcctgtggttgcttctccctttggcagcgtagtaggtatattgtcatatccgtagaatcttgccacttcctccgccaaatccgcggtacggaatatatcatgccggaaggtaggcgccacgatctcgttggcatctgtatcatatgccagcccgacccgttccagatagcccagcatctcttccggggtcaaatcagttcccagcagatcattgattttttcaggtgcgaatggcacacgaaccggctcttttggggtggtatagacatctaccattcctccaaccacttccccagcaccaagttcctccataagctggcaggcacggtcaatggcagcctgggcattattgggatccaggcctttttcaaactttccggatgcatcggttctaagccccacttttttgctggacagccggatatttgtaccgtcaaagcaagctgcttcaaagagaacggtctgcacattgtctgtaatcatagaattctctccgcccataatccctgcgatgcccacaggctttttgccgtcgcagatcataagaacagaatcatccataacccgcgcctgaccgtccagggtaataaacttttcacccttttttgccctgcgcactacaatttctctgccttcaatagcatccagatcataggcatgcattggctgtccgaattcttccataacatagttagtaatgtctacaaggttattaatggggcggatcccattggcagccagacagcgctgcatccacttgggagaaggacctatttttacatttttcactactcttgcacagtagcgcggacaaaggtctgtgtcctctacggtaacttttatataatcaccggcgttttcgctgtttccggtttgtaatacattagggggaacaaatttctttccaaaggtagcggcggcttcccttgcgattccgatgacgctgtagcagtccacgcggtttgaggtaatctcgtactcaaatattacgtcatccagccccagagccttcacagcattctctcctacttctgtatcctgtgggaatatatagatgccgtattccggcgcttccgggtaaaattctctggttgttcccagttcttcaatagagcacatcataccagaggattccactccccttagcttgccctttttgattttcacccctccgggagtttttttgccgtcatgtcccccggcaaccctgccgccgtccagaaccacagggactttgtccccttcttttacattgggggcgccggtcacaatctgcactatctctgtgcctacatttacctggcacacaataagcttatctgcatccgggtgtctctcgattttttcaatctggcctaccacaatcttttccaggtccgcatccagtatttcatagccttccacctttgttccggacaatgtcatagcgtccgtgtattcctgtgccgtcacatccagatccggcacgtacattttaatccaagacaatgatgtattcattctttctctcctccttagaactgttttaagaaccgtgtatcgttttcatataaaagacgcatatcatcgatttcatacttcagaagggcgatgcgctccagtcccataccaaaagcaaatcctgaatactcctccggatcaatgccgcacatctcgagcacatgagggtgcaccataccgcatccaagaatctcaatccagccggatcctttgcagaaacggcagccgcttccgccgcacttaaaacaggtgacatccacttcggcgcttggctccgtaaatgggaaatgatgagggcggaattttgtctttgtatccgggccgaagagttcttttgcgaattcttccaaagttccttttaaatctgcaaatgtaatatgcttatccaccacaagtccctctatctgatggaaggaaggagaatgggtggcatccacttcgtcagaacggaatacccgtcccggtgcaatcattcggatgggaagctttccctgttccataaccctggcctgtacgggagatgtctgggtgcggagcacgatgtccttattgatatagaaggtatcctgctcatcctttgccgggtggttggccggaatatttagtttttcgaaattataaaggtcatattctacttccggcccttccaccacctcatagcccataccgataaagattctctctacttcctccagagcaatggtattgggatggcggtggccaatctctgtctttttggcgggcagtgtcacatcaatgacttcttccttgagcttctgctccataagtctggcttccagcttttccttcgtctggtctaaaaggctttcgatagcttccctggtttcatttaccagctgccccaccagaggtcgctcctcttttgccacgtccttcattccttttaatacagaagtaagttcgcctttttttcccagaaacgctaccctggcctcatttaatttatccagggagtctgattcctgaatacgtcttacagcttctgcctgaatctgttgtaatttttctttcatgttcttctcctttcgatcaaaaaaagcttcctccctaaaagggacgaagctgacagttccgtggtaccaccctgattcccggaaaaaccgggcactcattacggcttaacgcgcctcacacgtcatttcctaatagcagcagcgctttcagaaatgcagctccagtgggaaattcaatcattatctgaacttaaggaagcttacagccggtgacttcctctctctgaaagaaaataaagatctacttacactttcacagcttttacattaaatatgtctgttttatattctaacatataaaagatttctgtcaagaaaaatttatttttccttttcctcttcttctcggcctccctcaagaagctgcacgtactcttttctgatccgctccacagcggccgaatgcacctgccggaacttctcttcaaaatagcagttgatctccgctccgatcataacaatgttcatacagatatacatccacaagaggatcaggatcaaactggtcatactcccgtacatattggacattccatcataatagtcaaagtaaagggaaaaaccgaaggaaaacaaagaccaggccagggaggtaaaaacagctcccggaatctggcttcgcagcgttgccttgcggttcggcacaaatttatacagaaacagaaagacaaaagccagcagtcccagtgcgattaccgtacgcaggctgataatcatagctaccagattagagagaaaaggcaggtgctttgtcagttccctctgtatgctgtttccgaacaccagaagcagcagggtgcatatgatagcaatcagaaaaatcatggtataaaagattgagcgtatcctggtaaccaggtaatttcttgtctcgcgtatctgatagatacagttgagaccattcgtgagggcctgtattccctttcccgcagaccagagagcagtcagggcagtgatgggaaccacagcaagggacttgttatacacttcctctataatacctgtcacaaaggatttgaagctgtccggacacaccttaatcacagcatctgccatttgctgcttgctgattggcgtatactgcactgatgtaagcagaagcagcagaaatggaataaatgacaataacacaaaataagccgcctgagcagaataggcagtcacatgatcttcatttattttattcataaatcctctcactgtccggtagatacgctttatcataatataagatcccatttcagtatttgatgactatcataataccatgaattattctttcaggcaagttaccgtcaaatcactgatcttcccctgcacggtttaaggttacaccattataaaaatactccagaatttccttatatccatttccctcctgtgccatatgctgggcaccattctggcttaatcccacgccgtgtccgtagccgccaccgtgtatggtataccccttcaattcctctccctcccggagctcctccagcgtaaagtaagcgctgggaagaagagaacctccatccactactgagccgtcctgcctggtaattttgagccctctcggcgccaggatctgccggattgtatattcattctgtacggtaactgtctcctttggactgttgatccccatggacaggactgcatccccctcacccacttccagaatctccagagaacttaaatcagtaatctcaggatagctgctttggattcccttcaaaagctgctcttttgaaaaggttacgctccagcggtaccaaggttcttctttgtcgtactcgcacacaacactcttcagataagctgcgggggcagatgcctcccaaacctcatctgtacttgtctttccgtgagaagtagagaaataataggcatcaatgggacttccattctggcagagaatctcccccctggtggctgctaccgcctcatctgttctctcatttgtgccgctgttttgatagacctggaaagagacactgtcgtccacctgagcccccaggtcttttaacttgttctcccccagctggacataggcataggttctggcgcacacagcctgggcttttaaagcctccatttcataggaggaaggcatctcactgggaacaaccccccgcagataagtctccacaggaagttcattcactatgcgcagccccgcctcctcctgataaatagtgaaggccccctgataggaaggatttccctgacctctggatacacttaaaagagtaagctggttattctcctccaatggttctatccgaaaggagccgtccctgaaataaggagaatccctttctacagtgacagtctctcctgacttgagagatgcttcctcccctccagttatcctgtaatccccccggatggtaaattgaagggaggaatgttcatagctgctgtagtcatctgtctttatcaacacttgtattactttatcctcagattctgtctctgccccagactgtccctcctggggttcctggtcctgggtcttctccacagttttcgtactctgcctggcatcccggatactggctctctcgttttcctttaagagccgctcttccctcaggttcatgtactgggtattatcatcctttcttcgggaaaagagggccagaaacaggatgcacaaaaagcagagtataataacaatcagtttccatataatcttattttttagcctcataccaatattatatgcagaaatacaaaaataagaaatcagggacactgctttttctgcaatatccctgattttattatcttaatttttattcaactgtaaatttatagacggttgtagtatgataagtctcacccgccttcaggacaggtgatggaaatgcaggtgtattcactgcgttggggtaatactgtgtttccaggcagaacgcactccggcggggataaatcaggccttccttgcccactacattatcgattccatttcccgcataaaactgtactcccggcagatctgtgaaaactgtcatcaatattcctgtctctctgcagtaagcctttgccgcctcttttaattttccaggctcccagtccaatacataattgtggtcatatccacctgtatatctcagctgatcgaagtcagcgtctatctcctgcttcattggttttagttctgtaaaatccataggtgtgccggtgacgtcggcaatctctccggttggtattgatgcagcgtcaatcacaggattatactttgttgcatgaatctgaagaagctgacccatggcgtaaccgctctcatgccctcccagattaaaataggagtggttggtgagatttgccaccgtatccttgtcacagctgccttcatagtgaattctaagttcattctcatcggtaagttcataggttacagtaacagaaaagttgccggggtatccctgctccatatccggactgagatgataaaaggtaatactgcttttctcgtcatccagagccttcacttcccagatcttcttctcatatccgtcaggtccgctgtgaagattattcccgttttcgttctgaggaatctgatattcggttccatttatctcaaatctgcctcctgcaattctgtttccgctcctgcctatggtagagccgaaatagcagggattatgtaaatattctgtaacactgtcatagcccagcactacatccttcagatgcttgtctttatccggaaccaacagagataccaaaatcgctccgaagtttgtaactttcattactgagccgctcttatttgtcagctcatacagatatacttctttctcatcatctgttctgccaaagcttttttcaattattcccattcactgtaccttctttccgcatgtctttttcagaaaaagagccattaaaaatggctcttttttatcttttgtaacagctatcatttgtaaacccaggatgccgttccctatcttctgactcctagctactgctaggtgggtttccgcaacacctcttctgtcttccgctgcgcaatgacggcctgacatctgaggagcaatgtaggaatcccgtttaaagtaaatgtaggttcaaaatgacaggagtcatcgaacatcccaggaattactttcttttctttgattttattatactctagtctcccgcatttttcaatattaatacttgaattgatgtaccaatttttgtgaatattgagaattttctacttgagggcattatgaaagcccccggtattcaccggaggctctgctgtacgcattagtttaattcatctactactttctgaatagctgccagcgcatcgtcaggaagtttattgtagccttcgttcttttcagcgaatgctttgatttcatttacacggtcattcatacgtgctttcagctgtgtcacatattctgtgtctttcatgtccggaacaaagccttcccattcaaagatttcgatgtctgagaacggaccccactgtttgaattctgcttttttctcaacaattgcttccaggattcctaaggtatcttttggctgtacctttttgcccatgaaatcacctgtgttgatgatatagcagtctacattcttctcttccaccagctttttgaacttagaatagtcatcagctaacggataggttctgaatgggttagcgtaaggaacaactaccagcttgttcggatctacccctggtgccagacgctctgctgtggaacgtttagtggcaagagttgcacccattacagaagccagggaagcgccttttaacttaactaccggaggaatggtcgggtctttcataatccagaagatagcgttaaccggctcgtcaattttatccacacggtttggcgcccacagtttagatttgatggcacgtccgtttccgtttctgatatcttctgttactaactgtactttgccctcatcatctaaggttgcagagcagttctgtgcagttaacaggaatttattgtcagggcatccagcaggataatcctgtgttttatcgaagtaagtaggctccagggcgatggatgcacaggtatctgtgttaataataaacgcatcgtcgtgaagtactttaatttcgtattttccgttatgttttgcgtgggtcaaagtggatttaccggaacctgacagcccgtatacagatgctacatatttggaaccgtcagccagtgtgtactctttctgtccgccgtggcaggctgcatatccgttgcggttggcgatagcccatgccatggtcagtgtaccttttttatgttcaccgaaatatctcataccaaggatgcaggcacagttctgatcggtattgaagtagcataatgtctgcggatcacttaagcagtcaaaattcacacccggatgatctaccggtgaccactggggatcagagaaaataaagatatctgcctctttgccgtctcccacagctttggagtttttatacatttttacgtattcatctgacatatactggaagttcagcatccaggaatacataacattttcttctccttccggaatcagaaggtgagctttaaccataaattcaggatccagacctacatatacttctgcatggtacatagttttccagcgggcttcatagatagcatccatagccactttgtccagagccgcacaatctactccgggttctccggcaatacggcgtgctgctgcataacgtccggtgatggcaccgtcattaaataataatacctttgcatctggttccagtccaaattcttcgcctctataaaccggcatatctgtaacaactgttccaggagagtttttggctaactcatatgcctcttttaatgtgttaactttaaccacattgttaccgtaaaatgcagcttcaatgatggaacgtgttttgctgaatcctgccttgccagcaccaatttcattaattggatagtatgcttttgttgacatgttatgtcctcctttttctccaaaatcaaacctattatctcattttcctcttacggtgtcaatactttaacaaacgatttcgaattattttcgcaagatgaattatttttatatgcatattacctaaattagtccactttatccgggcgtctcgtatatgaatgtcttatcagggtttgaaacggccaatcggctattttaaagtaaatatttacatacttccctggctgtatctattttttcaaaccaatcgtcagacaattgatgtaaatgagtgaaatgaattatttttgtgtctgtcctgcattttaacggtaaacacaaagagatgtccggatcattacccccggacatctcctgttttcttatattcccagaatttttttaacaatctttggcatctcttctacttccactgtagtattgtggagcaccggagcggtacggatttcttcgatggcattgggcaccggtgtattggaaatctttgacagttcatccaccaattcaaaatcccccatggaagcatacttctcatcaatggcttccattacgcttctcgtgaatttgtacggactggcggtagaagcgattaccgtctttttcccgtcttttgtctcttctttgtatttttcatagacagctgccgctaccgctgtatgtgtatcaatcacataaccagtatcctcatagattcttttaattgtctctgctgtctctttctcagatgcataattcccataaaaatctttcagttcttccagcatctcaccggttatggtatatttcccttccgtttttaagctgtccataaactcctgattcttttttgcatcattcccggttaggcggaaaatgaggcgttccagattactggagataagaatatccatggaaggagaggatgtcagaataaacgccctgttcttgtcataagttcctgtgcggaaaaagtcaaacaaaaccttattgtcattggaagcacagatcagtttatcaattggaagccccatattcttggcataaaaagcagccagaatatttccaaaattacccgtgggcactaccacattaattttctcatctttttcaatttcaccgttgccgtacaatgtcgcataagcataaacataatacacaatctggggcacaaggcgtccgatatttattgagttggcagatgaaaactggaaccctgctgcggccagttcttctgtcatattcttgtcattaaaaatattcttaacccctgtctgagcatcgtcgaagttaccgtggatacttacaacataagtgttattacctttctgggtaaccatctgcttctcctgaatagggctcactccgtctttgggataaaatactattatttttgtacccgggacatcagcaaatccggccatcgccgcttttcctgtatcccctgaagttgccgtaagaatcacaatctcattctctacatgattctttttggctgaagtagttaaaaggtatggtaagatggagagcgccatatctttaaaagcaattgtagatccatggaacagttccagataatatgccccgtcggacttcgccaaaggtgctattacttctgtatcaaactttttatcgtatgcccgggcaatacagtccttcagttcatcctctgtgaaatccgtcaggaatttgctcataaccgtatacgctacctcctggtaggtcatccctgataaagtttcgatatccgtgtcaagggcaggtatctgcgtggggacaaacagtcctccgtcctcagaaagtccttttaagattgcggcagatgccggcactgtctcattgttaccccttgtgcttttgtataaaatctccatgttttccattccttttctatgtattcattattgttgcgcatccctgaaaatatctaccggaatgattcccagggcataaggtgttcattgcatgttaaagtataccataggaatttcttccttacaagtaggaaaggaaaggacgcctgccttcaggtacgccctttccctcttattctgtctcatcgtcaggataagtataaaaatcatgaactccatacttaaagagtttcttcaaatccttgtcaaaccattcaacatttttcttttcagcctgttcctttgctacaaagaataaagcacctttggaataatcttctccgtctatagctctgtttactgcctctctcgtagtatcagagactgtaaccgtatgtattcttccgtcagaggtaggggaaaactgaggttttcctgcaaccttttcccatacaacctttgtcaccgtatccggaaatctggaatcctttacgcggttaaagattacattggcaaccaggatacgacctctcatatcttcaccgcctgcctccgcttccacaatagacagaagtgtctcatagtcatgatccgtcatacgcatcctgtcttccaccacatccacggaatgatctcccagatattccacactggtagccacttcttctcccacttcaatcctggattccctggtctgtgttgccgtccgctgacctaccagaaccgcctcataggaggttcctattcggccgacagtattattcgtattctgtgtaaccagaactcctgagataattccccccagtccggataaagcttcctcttcctccggttctttctcctcctgggaaggattatccttttcagccgccgcatacactgcattctttcctccgctgcctagtgcattggacgtaaaggcaattgcggcaaccgctactgagccaaccaatatgactgcacaggacctgcgcttcttttttgtaattttttctgccagaaactgaaaaccgtacagcagatttctgattagttccataagctggttccttaacctcttcctcagtaagatatcaacaagttccaaaataagtgattgttttaaaattataaaataataacttggtattcgtcaatatctaaggaaatttttcagccatattgcacaaaattcaatagattatttccaggtatttttagaggtatttcacaaagttttcagcaaatttagacatttaccgattgttgattgctgttaccagggcatcgatggaagcccggataatatccggatccacccctgctccccaggccagagaaccgtctggttttctgattcccacataggcgatggctttggagctggagctttgctctaaggcatgttcctgatacgttaccagatcgtatttcagcccatacgccttcttaagcgcattgcttaccgcattgagacgtccgtttccggccgcttctgtcactgacttctggcttccagcaaaggttgaagtcactgtggttgtaatccccccgtctgtctgctggaaatgaacttcgtgaatattcagcggctctacaacgttctcgaaagttttcttgaataattcgaatatctcctccggcataagctccttgtgcgtatgatcggacactgcttttgccgcgtatcccatcgcctctctcatcttggcgggcagattcaaaccaaactttgtctcaagaatatagcctacgccgccctttccggactggctgttgatgcggataacatcggcatcgtaatttctgcccaaatctttgggatcgattggaagatagggtacggtccagtgtttgggatctttctcctccagccatttcattccctttgcaatcgcatcctggtgggaaccggagaatgccgcaaataccagcgcgccgctgtagggcctgcgctcgtcaatatgcattcctgtatattcctcgtactgctcacagatctcaaccatgttggagaaatcaagctccggatccacgccctgagaatacatattcagagccagggtcacaatatccacgttgccggttctctcaccgtttccgaataatgtcccttccaccctgtccgctccggctaaaacgcccatctccgcatccgctacgccgcagccccggtcattgtgaggatgtatggacaggattacattctccctgtatttcatattctcactcaggtactcaatctggctggcgtacacatggggcatagagtgctgtaccgtaacaggaagatttattatcgcctttttatccggggttggctgccagatgtcaagaaccgcattgcacacttccagggcatattcgggctctgttccggtaaagctctcaggactgtattcaaacaggaaatttccctctgtctcctctgccagttccttcaggagagctgcgccgtccactgcaattttcaggatctcttcttttgattttttaaatacctgctccctctgcgctacggaagtagaattatatacgtgtacaacggcttttttggccccttttaaagcctcaaaggtttttttgataatatgttcccttgcctgtgtcaaaacctgaatagtaacatcatcaggtattaaatcctgctcaatcaatgctctcaaaaactggtattccgtctctgaagctgccgggaatccaacctcaatctctttaaacccaattctaacaagcagtttaaaaaaatctattttctgttccaggctcatgggaatcacaagcgcctgatttccgtctctaagatccacactgcaccaaacaggtgccttgtcaatgtactccttctctgcccacttcatacatttcaccggcggcataaaatattgtctggtatacttgctgcaatttgtcatagtaatatcctccctgatttttattttttgataaaagaaaaagccctccgttctatcccggcattcattgcctgatagagacgaaagactgctaactgtcctacgcggtaccactctattttatgaagtatcttcatacgctctgcaagatacgggtcactgcaatgaccttatatctctccctgaataacggtcgggctccgtctgcgtctacttttccttagaatttcgggcagccgctcggaggcgagttcagatcattctctctgctgctttccacctgccagcagctctctgtcatcgaaaataaacttactattcctcttcatcgctttttcttatatcaatctatagaatataagataacatttctcccatccattgtcaatcttttttctaaaaatgggtacaaaaaaatcggggcaacaggatttgaacctgcgacctcacggcccccagccgtgcgcgctaccaagctacgccataccccgatatgtgtcagtgtctcttatctgaccctgactactatacactattttgttgtgcttgtcaatagcgagaaagggatttgaacccccgacactgcgggtatgaaccgcatgctctagccaactgagctatctcgccacaccgcttctggactaccagagcgaacttccatatattatcattatttgccttattttgtcaatagtttttctaaatttttttatcttttcctcttcttatttttctactataataaaaagcaaaaaggagaatgtactatgataaatccatctgctgaagaattgctgaatttcttcaattatactatgaagcttcagggtctgtcccctgagaatgcagcagcccggatgggtatagaaccccaggtcctcctgcgtctgctttccgattccagcctgacatttcagcaagctgtacgcatagccagtgctataaactgccaaattcaggtggaagataaaaggaacgggaaggaaaaggaatttacttgtaagtcatacgcaccatttagtaagtaaaactttctctgcgtatgcggacagcgcttcgggagggattcctgtttcccgcccgaagcaaccggcccataacgcagagagccgccttaatcattattgattaatataattaatcagcccctctgcctttataatcttctgcataaaaggcggaaacgcctgccctttatattccgtcccctttgtcttatcataaatcattccactgtcgaaatctacctcaacctcatcgccgttttctattgctttagctgcctcagggcattcaataataggcagtccgatattaatggaatttctgtaaaaaatgcgggcaaaggtttcggcgatcacgcagcttacgcctgctgcttttatggcgatgggcgcatgttccctggaagaaccgcatccaaagtttttatttgccacaataatatcacccttattgactttgttcacaaactcctggtcaatatcctccatacagtgtgtagccagttctgcagggtcagaagaattcagatatctggcgggaatgattacatctgtgtctacattgtcaccgtatttaaaaactgttccgtttgctttcatctttatctcctcctataatcctaattcagcaggatctgatatctttcctgtcacagcgcttgccgctgccactgcagggcttgccaggtacacctcagaatccacatgccccatacggcccacaaagtttctgttggtggtggacacacagcgctcattggctgccagaatccccatatatcctcccaggcagggaccgcaggtaggagtgcttaccacagcaccggcttttataaaggtctgtaccagcccttcctcgatggcctgcagataaatggcctgtgtggccgggattacgatacagcgcacgccttttttcacctttttgtctttcagaatctccgctgcacagcgaaggtcctcaatacgtccattggtgcaggagccaatcactacctgatcaatcaccacatcttctgcaatctcatccgtagtctttgtattttccggcaggtgggggaaggctaccgttggctttaaggaactgaggtcaatggtatattcctcatcatacactgcatcttcatccgcctcgtataccgtatacggcctgttggagtgttccttcatgtaggcttctgctaaggcatctacagggaagataccattcttgccgccggcctcaattgccatgttggcaatggtaaaacggtcatccatagagagattttcaattccctccccggtaaattccatggatttgtagagcgcaccgtctacccctatcataccaataatatgaagaataacgtctttcccgctcacccatttagatggcttgccaattatgcggaatttaatagcggaaggaactttaaaccatgctttaccggttgccataccggccgccatatctgtgcttcccacaccggtggagaatgcccccagcgcaccgtatgtacaggtatgggagtcagctccgataatcacatctcctgccactgtaaggcctttttccggaagcagagcatgctcaatccccatgtctcccacatcaaagtaattggtaatatcatgcttacaggcaaactctcttacacatttgcagtgttctgctgatttaatgtccttattcggaataaaatgatccattaccagggcaattttatctttgtcaaatacagtatccccttttatcttatccatttcgtgaatcgccacaggggatgttatgtcattgcccaatactaagtctaaatctgcctctattaattgtccggcttctacagaatcaagtccggcatgtgcagccagaatcttctgtgtcattgtcatacccattcgtaaatcctcctttatgttccatttcttttcttgcatttctattcttgcatttctttagttgtaattctaacacacttcctggtataatagaaatacatataatgcatatttactataactattgattatatgttactgctgatatgacagaaacagcagcaattatattacagggaggaagtatggatcaaaatctttcgttatacaaagtcttttatactgtagccaattccagaaacatttctaaagccgccgcagagcttttcatcagccagcccgcaatcagcaaatccatccgaaaactggagcagagccttggtgtcaccttgttttccaggaattccagaggtgtccagctgactgaggagggggagattctctacgaatatgtggagcgggccttcgactctctgcagttaggagaggcgcagctgaaaaaggtcaatgagctgggcatcggccatcttcatatcggcgtaagcaccactctgtgcaaatatatgctcctcccctatctgaaggcctttatcaaagctcatccccatgtaaaaatcaccattgactgccagtccaccaaccatacccttcagctgctgaaagaaaacaaaattgatatcggcctgatcggacggccggacagtctgcatcacatctgctttgattcccttggagagatcgaagatatttttgttgcaacgaaaacttatctggataacctttccctcagaaccagaagcaatgaaatggatatcttccgctcggccacgctgatgctgctggataaagaaaatatgacccgccagtatattgacgactatctgtcccttcaccatattgagacaaataatctcctggaaatttcaaccatggatcttctgatcgaatttgccaagatcggtctgggggttgcatgtgtcatcaagcagtttgtctcaaaagagctggagaacggaacctttgtgcagattccactgccctttcccattcataaaagagaaataggttttgcctatctggaaaatcagcagcactccaacgctgtgaaagactttgtagccttctacaccgcccagaagccccaataaaaaaccggttcccatgatatgatacctcttaagtagacaaagtaaataactaaagtctacttaggaggtattttcatgtccaaatcaccgcatacgccagagttcagagcaatggtttctcaagagtatcttgacggtttaggctcatatgattctctggcagctaaatatcaaatcggcagcacacaattaagagaatggatcgcaaaatacaggcagcatggtttgtctgcctttcaaagtacaaaaggtaacgctccctattcatcagagttcaaaaccttgtgtgcggaagccgttttatccggacaaggaagtgtggatgacattgttgcaaaattcaatatttcgagccgaaaggttttgcgagactggatttccatgtataatgccaatagagaacttaaggattatgatccgaaacgggaggtctatatggcagaggcacgcaggaaaacaacgatagaggaacgcatggaaatcgttcaatactgtattgagcatgatcgcaattacaaggatacagccagtttatatgatgtttcatacagccaggtctattcctgggtaaagaaatatgatgctgacggggaagatggtctgtcagacaagcgtggtcatcacaaaacagacggtgaagttgatgagttagaacgtttacggcgtgaaaatctacgtctgaaacgccagcttgaagaaaaagatatggtggtcgaattgttaaaaaaagtgagggaattcgaagggatgtgaggattggaaaggtacgttacggatcaaaatatcaggcagtgaagcatttctacgaagctaaagagtggagtataaactggatgtgtaagcagtttggaatttccagagccggatattataaatggctgcaccgggacattcctgtgcaggagcaggaaaaccaaaaactggctgagctgatcaaagagtatgatgaacggttccgtcacatccttggttaccgcagaatgacatcatggctcaatcatttcaaccatacttgttatagtcctaagcgagtgcacaggatcatgaaaaagctgaatatccatgcagccatcagaaagaaaaagaataaatataaaccatccacaccggaagcaacagcggaaaataagttaaagagagagttctatacagatgcgccaaaccagaaatgggtaacagatgtcacggagttcaaagttccaggagagaagaagaaactgtatttaagtgcgattttggatctatatgaccgatacccggtttcgtatgtgatcagctgcagaaatgacaatggactggtatttaaaacatttgataaagcaattgctggcaatccaggtgcaaagccgctttttcacagcgacagaggattccagtatacaagcaggctatttcaaaggaaactgaaagaacagaaaatggaacagtcgatgtcaagagtagggcattgcattgataatggccctacagagggattctggggtatcctcaaggccgagatgtatcaaatgtatgagataacagatgaagcgtccttacgctttgcaattgaggactatatacgattttacagtaaagaacgtccccaggaaagatatcagtgtaagtcacctcaggaagtacggattgaagcattaacttcggataaaccaccagaatatcctatagcaaagaacaggcgaattgagaaatataaagagaaatggtgtgcatagaaaaatgaccacacttgaaacggtgtggccattcatcagcacttaattttagatattttacttgtctacttgacaaggggcatatcaccaggaaccggttttttattgtctgttttagttatcaattaatttattgccatcattccagctgtataatttgcggagctcttctccaacattttctaactggtgatttccttcttttcttctcatggcgttgaagcttgggcagccaacctggttttccactaaccagttgcgtgcgaacacaccatcctggatatcctttaagatctgcttcatcgctttctttgtctcatctgtaacaatcttaggtcctgtgatgtaatcgccgtattctgctgtattggagatagagtaccgcattcccttgaatccgctctcgaagatcagatccacgataagcttcatctcatggatacactcaaagtatgcactttccggttcatatccggcttccactaaggtttcaaatccagccttcatcagggcagttacaccgccgcagagtacagcctgctctccaaagaggtcagtctctgtctcctcacggaaggtagtctgaagaacacctgctcttgcaccgccgatagccagcgcatatgccagtgctttgtcatgggccttgcctgtataatcctgatgtacagcgatcaggcagggaacgcctttgccctcctggtactgactccgaaccgtgtgaccaggtccttttggagcaatcatagtaacatctacattctttggaggacgaatctgtccgaaatggatggcaaatccatgcgcaaacatcagcatgttgccctcttccagatttggttcaatagactctttgtacatagctgcctgcttctcatcattgatgaggaccatgatgatatcagctttctttgcagcttctgctgcagtatatacttcaaacccttgtgcttctgcttttgcccaggatctgcttccttcgtaaaggccgatgataacattgcaaccggattccttggcattgagcgcatgagcatgtccctggctgccgtatccgataacggcaattgttttgccttccaataaggaaagattacaatcttcctgataataaatttttgctgccatattacttttcctcctactatgtttactttttaatatatttgttagggaatgtgaaatcctctagctaactgtttttacagagcgaaactatgtattataagtatcggacatcttccgcccctcttgacaaaccagtgattccggtccgcgcaagctccagaatctcatatccatccagaaggttcaggaacgcctccagctttgtctgtgtacctgtcagttccactatcagtgactcttttccgatatcaacaatattagccctgaaaatattggccacagcgattacattctgcctctgctccggactggtacgaactttaacaagaatcagttccctgttaacgctttcattatcctttaatactttaatatctctcacatcctcaagcttttccagctgcttggtaatctgctctaaaatcagctcatcgcctctgcagaccactgtcattctggaatacctgggatccgctgtcacgcctacggtcaggctgtcgatgttgtatccccgtctgctgaaaagccctgcaacacggctcagtacaccggcggtattttctaccaaaatggataatactcttttcttcataccctaccttctccctgtattaataacttctatattgcagttaattctatcaattattcaattttttgtcaatggatttgtcgagttataactaattcgtatgaaagttataacctataggaataaacattcaggtgcggaaattcctgcaacagaattttccgcacctgtaaaaagctgcctttctgagaactcagctaaccttccagacgaattctccattttcctgtattccataaaaatcactgaagttcagctcaaaaatatcctttttaatagaagcaaccggtatctgattctttatcagatactgccagataccggcatgtgcgatatccccctggaggagaacccctgccacttttccattccgaaggattatccgcttataattgcgggcatcctctctggcaatcacgacatcattttcctccggctttatgactcctacacacagagaggccagaccaaagaagttgatcgtatttttaatggcaaaggtatctgtgtaagccaccgcagatcccatcatattaagggctgctgtctcgccctgcttcatggcattgggccatatgccggagagccccgtaacatctccggctgcatatatatccggaacatcagtctgcagatactcatttacctgaattcccctgtcaatcctaattccttccccgtccatgccggcggttcccggacgcactccggctgccactatcaccatatcacagggaatttcttccccattgtccagaagcagccgggttacttctcctttttcattgcacagggtatcctgcgcttttctgcccagaaagaagcggcatcctgcattctcaaagcgcttctggtactctttggcacccttttcatccagctgaatgggaaggatttgatcagccatctcaatgaccgttacctgttttccctgttccatcagcccgcaggccgcatccaggcctaccagaccggaaccgatgatggcaatctctgaagagacttctgcctttttgtcaattgccctggcatccctcagatggcgaaggccgaacacattggatgcctcccggagttttcctaccggagggataaagctttccgcccctgtcgcaatcaaaagcttgtcataagagatctgctgcccattatccagaaccaacttttgggacgaggtatccagctccactgccgtacatcccggcatccattctatgttgttttcgcaaaaaaagtcttccgggacaaagttcagctccttttcatccctttcatgactcagatatttgtgaagcatgcagcgggaatgtaccctgtcgtccgtggagataatacgtatggagtcttcctttctcccctttcggagggtcctggctgcagtgatgcctgcagctcctgcacctagaattacatatttcataccttacacctcctctacatatatagcgtctttgggacaagctttcacgcagctgggttcccctcccgcgtctttgcaaaaatcgcatttgatgatatgcatgcccgtcctgtcatctggtttcagaactccgtaagggcagttcataacacacataaagcaggaaccacatttcttttcatcatagcagacatgtccggattccggatcctttgtcaaagctccgctcatacaggacatgacacattccggctgatcacagtggcggcagaatatgggggtgtagcctccagttctgtttttatagataaagtttctggattcgttatccggatccaggagattcagatcatataaagtacccgtatcttttctatgggcctgcatacaggccagagagcagttcttacagccgtcgcatttttccgcgtcaattattattcttctcataccctcagcccctttctatatatgcagtccggcacgtttctcctcaatgattttctccagaatatctgcactttcttttccgtcgccgttgatgatcacctgaccgccggtaagatttttcatatcctctgttaacactttggttaccagctggcttcctgtgacaaagggcggaagtcccagatgcagaggaagtccaagggccagaccaaagcatccgtctgccagggcctgttcctccagccactgtgctgcggagagggcaagtggaagctggggaatatcaataccgatggcctcagccagttctgttgcaacaatctccagtcttccgatcgccagacatggcccaaaattcagcaccggagggattcccagcttttcacagacagcacgcagcttcggacctgccagtttggctgcctccggttccataagtccgcagttttcaatacctcctgaagaacatcctgcggtaaggacgagaatatctctggaaattaactcctttgtgagctccacggtcaatacatcatggccccccgcggtaaggttggaacatcctactactcccacaatgcctttgatgtctccggatacaatcaagtcaataagaggtttccagttcccgcccaagaactcttttaaggatacttcacttactcctgtaagcgttttatcatttccgtgctcagggaacagattcatttctactttgcctcgtctctccttatatgcggcaacgatttcatcgatgatttcttcgctctgctgttctctctcttcaaaaataaagggtttcatctctgcatttgccttctttgctacactgtcaaggcaaatctgtttaatcatcattttgtcacagataggctctatacccggcaatgtacaattaaactcagagagtacggcatcaattccgccggtagcaagcactgcttcactggtatagttatttcctgcatggccgtcgaagacttcctggtaatgagccccccgaagctgaaggtcctgaccaacacaggtacatccaaccagtttaaatcctttggctcctgccgccttcgcttttgccaccgcctccggggaagtcaggcgctcctgcagatctacaaaaattgtatgctgatgcccggttatcataatgttaatataatccggatcgattacgcgcagtccaaccggggccatacgaagttcaggctctcccaggagcacatcattcaaaagatttgtcagcgtcagaccatagattccagtagaaatacctagtttcagacagtcagtaagcatatctaccgggtcagaattcaggttagtagaacattttaccactccgtggaagacttctcccttggcgcctccgggaaggatcccaagctcttcccatttttcatagcggggagcataggccatcttctttaccagctccattttttcatattcaggtttgtagagatccgcaagtacagcgtccgctacctttaaggctgtctcatatttgtcttttcctttcaggccgaagagttgggaaagacgctccagcgctttttcccctttgatttccccttttgccagggctgtcttctttacattcagggctgtattttctactacatgaatataacatccggaacctgctgccactgccctcagaaagtttctggcaacaatggtgtccgcagtggcgccgcagattcctctgggtgcctttggtgtgatgcggcagggaccattagagcaaaggcggcaacagaccccctggagtccaaacccacacttagtgctctgcccttccactctgtggtgagacgtctccactgaaagattttttatgtacccttccaaaggcttatctgcactcgcacatgtgttacatccaaaacattgattcatcattttttcctcctgaatacttgattatttttatcaattttatttccgaaaaaacagcaattcctgagaattactggattgataatattatatcaatcttaacctttttagtcaagattatttcacactttttttgaagaattttccatgagacatacgtacagtcagcctggctgactgtaccaggctgtcctatactattttccctgcacgtatttactcagaatcgccgtgcataccagacgggaagacagaagcgcgctcctattatctgaataccttccatttcttcatcacttcacggatggccttttctgatccctccttatccttgccgtaatcgccggctattttcttgatttcctgtatctcctgataagtaagagaaaacgtatactcaggttcttccttcttcagtctctcttccagttcgcttctgctccagtgagaatcttctgccagtgtatccagatattccaaagaaataaatcgaacatctgcttcctctccaggctcttgctttgtgtctgcgaccgctatatgcagctcagcaacgcaggtcttcccgaatctgtcggtagctgtcacttctcctgtgtattctccaggcaggagcccctgttccagggataccgtctcaccgtcagtatcctttatttctgtcagcataaggtatctgcgtatatccacaacctgcccgtccctgtcaagaacaccggcagcttttgccatatcatcctctttgtcttttactgacacataatttagcagcacctcctctgatactctgccttctccggcttcatcagttgttaaaatcacccgttttggaactgtaattacgggaggctcattgtaaaccacagaaaccggcatttcacagaatgatacatttccagctgaatcttcggctttgcacagcagaaaatctgtaatcctctcccccttctccattccccggtcctgataagtatcaagaatatagctgtccgggagtccctgcacaaactcttgattttctccctgatatccacttttggttctgccataggagatttgtgtgatctcgattttatctgtaatgtccccatcctcagtatccatcccccgcagtatccccttcttaagctgagacgccctcacctcttccccttcataaaactcatttccgcatacttccagagagggagcataatcccatattgcatagagagtaatctctctgattccttctgcctcagtaaatggatacatggataacagcctttcaggaaaaacttcctccataggatacaatagttttccggtctcgctattggttctcacaagtgaccagcccacaaaagcagcctgttctctctcaaactcattgtcccgaatcctgtattttttgtttacagagacaacctcagaactcatcaccccggttcctccgtttgcatcataacgtattctgcagccagaggaattcaggtatacactataggcatagggtgtcagttccaggcttccgctttccaagacaaggagtttcccggacgcagtatcctgcgttttttgctcaagagagtatttgtctaattcgctgtctcccggcataagggtatagtgggccagcaccctgccttgaaaggtatcttctgacgccatctgacatacaaagcgctctatgcttcctgtcactgtaataaatcgtgagggagccagaaaaacttcctcttttaccctgggattcccatatgccttcagcgttccgtccagataaacagaccctcctcttactgcggaattattctccaacgtgcttttggacagctcacaggcggcaccattcaggatacagattccgccgccgtcctttgtcccggaattatgttgtagagcacctccagaaacagcagttcgggaggcggaggatgtactgcagattcctcctccctgtgacgcctggtttcctgtgacttctcctcctgtcatggtaaaggcaccctggttaaagatgcctccgcctctggaggccgtattatcttttatgcatccgctttccatgaggaattctttcttatttgtgattccacctccatcacttccacggttggaggatacggtgccattcttcatggtatactttccttcgttcaaaatccccgtgtttttgttgctgcggacattgcctgaacaaaacagcaattctccaaaattatatattccgcaatgattgccgtatatctccggtgtcccctccagcttcgcatatccgttgggatacagcaagaagccatatctgtaattctcatgtattgagacattcgtaacgctgaattcggcatattcggaagacgcaaccccatattgatttctgtagaattctcctcctgtcagaatgcccctggctcctgttcttttcccctcataggttccggctatgtataatccggtatcgttttcataaaacttccctcccgacacctgaacggttccatagcttcctaccccatcatgataattccctctcagactgcccgactctacaataatcagactccggacctccccatagattccatggccgatagaattctgaatgcagacaccgcttccctttacgcacagtgtacctcccgtttttacaaaaaggttgctggtaacatcgtccgccaccttatctttttgtccatcaaataccaggctgccttccagggatacatttccggtaatgacccatcgctttaagccagtgccatatatggtacatcctgagctattgggggcggtcgttaccgtcatagtcttaccgattctaagttccgcttcatttgcaatacttgataccgtcagccggacagttgtacagtggcctgatcctgctgcctgctgcagagtcttaaagcttcctattcctgccgtagtacagtaaccgcttccattcacatagttattgctgtccacccatgtgtttgtggcaatatacccattgtctttgaagtaataccagtcatacacaccattgtaagccagatactgccagcagtttttgtagtacgctgtagtactgtaggcataccaccatccggtactgtcactgttccatcctatcttgtaggatgcacgtgccgatgccaggagctttttcgccttctggaattctgttttcaactcttccttgggcgcttcttctttgtctgcttcttctttgtctgcttcttccctgggagctatatccccgggcggctgctcttcttgcttccagggcagttttgtctcccccttcataaaagaagtaaatcctgccaggatccgtcttttttttgcctcgtccggaagccgaatcaaaacctttgtcaaaggaatcagaacctcacgctccagggcagacattccttcctcctccggctcttcagcaaaatatgtcctccagcacatgtaggtatctgtcagggatttcagctgggaatacatctcttcccccgactgataagcctctgtcatttctgccagggctgcctcagcctcagcaaattctgtttccgcctcctcagtctggatgctttcatgatacatctgtgccacatacaggcaggtataaagcttttcctgcagttcttctcctgctccctgccgggtgctattttcctctaagccttcctctgaaagtctgagaatattttctctttcggcacagattgcaaagtaaaacgtataagcccttaaaaagaagtatctctcagctccggaccgtgacaaaaaggcggttcttttgtctccttccggcagcaaatgaaaggatcttatatttttctccagataatcggctgtctgaataaatgttttctctttcactatgctttcctctgcctcgtcttctttattgctctcactctcagcctccatcctttctgtggtttcctgcctttgtgcgctgaccggagatgccgctgtcaagaaaacgcctgccagaacaagactaagcatcctgataccctttccttcctttctcagcctcttttttctaagataaccgctcttctgcaggtaatcaccccctcctttcctgtaaaatgcctgtatttttctttcagtaaaagttcaagcattcctttctcataatctacattcataacggacacctctatatctccaaagctttctatctggcagcagagattaagcaggaaatcagccaccagctctgtctcattcctaatctcataggtttgatccgcatataatatttccatggactgttcgatagcaatggccgcactttcttccatctcactttttcgaatactccttccatggactgtaagcactgcagcgccggttaaaacaagaaggaacagtgataaaaatgatataacagctgttttcatactttctccttatctggcatatcctctgatctcatgtacctctgatttgctgtggagaatccccactgaatacgtatattttacaaccacctcgcacatcctgcggttaggaataatttcccttacctcaaccggttccagctcataacccagtctgtcggcttctctgtacaggctgcttattacctccggattataattactgttctcgatctggctgactgcggaagcatgaaaatttctggcattctcagctgcaatgctgccggtgaccagcgaagtgcccataagggataagagaagcaaaagtatgattcctataaaatatcctggaagtcctttcatatctccctcctgtgtttaataggataagctctccgctatccacaaaaatacagctacaaggcatccgcctaaaattgcgatagctgccgactgacaatattcttcgataatttctctcgtagttccaccaactttccttatatttttctcacaaagatacggcagctgctgttatcatttactgcttctttgtacatggcttcagctgctgctgccttatcctcccgatccgccacaagctgcaggcagaaatcccccacattggttgcagcctgcaggaaacatccctcgtactgcgcaggacaccccaatagctcaacactgccctttagcttcccgcagtttttaaacgtgtttctgcagttcctgacaccggaagggatgggacctgtcagttccagattcccgcagtcttcatacatgccctcaatgtctttggccccgccagggatcccggccgccctgagctgcccgcatcctttaaacgtataccggaagctttcagcagtctcaggcatccaggggatttctttcagacttctgcactggtaaaaccacccgtccatacgctttatctcgattcccttctcaatcctgcaggcctcaatggtttctctcatctctttccagggaaccgtatcctgattcaaagacttcactctcccctttccctccaaagacagaaaaagagtctcatcctcttttttatagagccgtgccctcacatcttccccctcctctcccatctcccattcttctataagagccgtgatctgagggtccgctttgcggctttgtacctgtatgtatccggatttccaggtctccatgtagtcttctcctataaggacaaaacgaattctgattactcctggtttatcccccgaaatctcataactgccattgacttctgtaccgtcttccaggtaatacctcacctgttcctgcaaatcagggcttgtaccatgacttgcctctgtaaccatatcctgcagtaatatagaatccccaatttccagcaccttattttccaccgcaagcttcggacttccttttttactgagcttctgcaggatctctcgtgtctcgctggtgtccgtcacacctgaagtcaccgaaaaacctcccaacagcttgagaattccttccggatacagcagaataacagcaaaaagtcctgcaatcactgcggccgcagccattcttccgtgttccccaaacaactgtctcatatcatttcagcctcccagtgtaagtcttccgaacacagcagtcagaactcctaatgggccctccggttccatgcaccatctgccggctgtcaaaagtacgattgcgacaagacatccggctattgttcctccatattcttccaatatttctttcatatgcatctcctaaatcattcccttagtaatattcatcaggcccaccaaaaggagccccatgtctgttatcatttttattgagcctgtaaccatagggataagtaccagcatccccacgcctgcaagagaatcttcattggaaagacgctccgccttgtccatcagatgatggttcctctctaccagaaccgatatctgcttttccatatcttccctgtctcccgctgcccacatagagtaaatcaatctcaaagccgactgcacgtcaggcaaatcaagccatggcataaaatccaggaagggttcgatactgtttggatttttttcaatagaaacgagcatcctggacagttcttctctcaatacaaagggagctttcccaagggatttttccagcgcattatgaacattttctgtctgcatcaggagcgagagatccatcagccagatcggaaacgacttatccacctcttttatgattcgtttttttgccaaacgatgcctgattcccggccaacaccacagcagtacggatatggttccaagcagcagcagcccagtccgtgatttcagccacacagcaagagccgcgaggagtgtcaaaagcagaagtttaacgggcacataacgtgatgctccctttctgtcattggttttcagatactcatactctttgcgaatctccgcctcctgtgcagcatcctccttcagccaggctgcctgaagctttttttgcccccagaaccatatagtaattcccgatatcatgtaggcagctgtcatgctctgggaaagagggtgatccaatgccataaactcctttgggagcatgatcatagatattttgcagattccggcagaaagaaggagagagatgaaaatgttccgtcttatatttctgcgctgctgggccagctcatatacacgctccacccacagctgccgatccagtaaaagtatatggagggcattggaaaaatctccccctatctcctctgccttcacgagaaattcatgggtttgtatcagcctcctgcaggaatatgaatcctctatatcctgaaaggctgcatgataaagatttccttcctctgtctcattttgtattttgtgtaccgcagactggatgactttatgcattttcccttccggaaacaccaaagcagcatcttccagtgaggttagtattttcggaatccttttaaatgaatacagcatctgctccagataatttgcagtatcctcaaagtctttctcttcacaggcatttttacaggagttcaatataataaagggtgacagcagcaaagcgtaaagggtgacagcagcaatataaccaatcttcagcccataccaaacacccagcaggacaataccggcgaaagacagcaaatattttttccaattattttgcaaagaaaatgtatacccatatctggagacctctgcagccagatggctggggtttaaaaaatgccaaaatcttagattctttttatttataattcattcatcctctcttttgaaagaaaagggtcatcaatgcccgcaaaggaaaacttccttttaatgtccggcggaagcgacctgtttataatacttcccccctctgccatcataactatcttattttttccattctccctgctgtaaaaacagatctgatccatatacctgcggattccctctcccaaatcagctccctttcttatgagaatacctgcgtctacaaaggaaaaaacatcattttcaatcctttgaggagatacggtatccttcatcatattttgaatccggtccggtaccttatttacatcatctgtgtgcagggttgtgaggcaatgggtccctgtgctcatagcctccagcagatatttcacttctgtgcttctggcttcagacagcataatccacttgggattctgccgcaggcagcttttgatggcttttgtatagtcaaaaaactcttcgtttacttttaattccacgcagtccttctgtggattaatggaacgataatggatttccagattgtcttctatggtaatgactctctcattttcaggaatatactttgtcaaaaactttaataattccgttttcccggaaccaggaagtcctgtcatgattagattcatatgcgcccgaatacaattttccagaaatacaagcatctctggtacacaatagccatccttcagcatgctgtcttcggtcagacgtctggccggagatgtctttcggatagagatagaagttcctgtgcaggccacactctcgtggataatactgacacgcagagtttctgtctccgcctccagcaaattattaaatttgttaaagcttttgctgactacgttgctgattcttgtggcaaactgactgacaaaatcttcggaaagttttatgtctgcccggtatcttcctctgtacagatgatcgatccagacatctatcccattgaaattgatgtctgtcaccaggtcatctctcacatagggcaaaagttctccgaaattctccggctgaaacgtccatacattcaagatctcacctccgaccttttatcttgcatttttaaaaaggactggtccaggtagggggattggtaatgccggactcgttaataaaatccgtgacagtcccggcaattgccgtcccgatatactgtcccagaggagtggccaatacaaccatcaaaagggcgattattgccacaataatgataattccatattcctcaagaaacgctttcatagcaatctcttctcctttcttccgtatttcgtctcagacgtatcatcacctccaaaagcagttctttttcacacaatctggtgcgcgtcccattttccaaggccagggggattacctgaataaaagcaggacatttcccaattcatgagcatacagaaatgctctcttccacaaacagcacgtatggtaagaaccataagtagtcttgataaaaattgctgatgttattttactcattgttaaatagggtttttattggaaaataaatgattttagaattgtttaagaaatactaaatctcagatagcatgttgtgaaagcagcttaaactgcaatgccatgaacacttgaatgaaacaagaaccttatatttagtcattgacaaaccctggcaggcgccctactattagcttacagtgggaaacttatgaggtttgccgttgactatggattaattataatagtctgcagactatttgtcaacaattatttaaccattttatatatcttattagaaaggagtctattatgagcctgtatgaaagagtgaagtcactctgcagagaatatgaaatcacaattgccgggttggagcgcacctgcggattcggaaatggtaccataaaaaaatgggagcacactactccctccggagacagacttgccagagtggccgatcacttccacgtgactgtggacttccttctcggcagagaacctatcccatcccaggaaaaggacactgaacttctggaaattgccagagagctgaaagagaacccggatatgaagcagcttctcgaaatcgcacgccattcctctccggctcatctgaaagcctacgtatcctttttgaaagaacttcaaaaaaaggaataatttcccctttctattattgacatatgtcgataatagttttataataaatgacataagtcagaaacaaaggagatgaactttatgccgcgcccgcccaaatgcagacgtatctgcgatctgcccggtatcaagagctttggtccgtgggaatcggacctccctcttcccgtttccgggaaggtagagatgacacttgatgaatatgaaagtatccggctgatcgatctgctgggctacacccaggaggattgttcccgtcagatgaatgtggccaggacaaccgtccaggcaatctataacagcgccagggaaaaactggcagatgccctcataaatggaaagcagctgctgattcagggcggctcatacgccctgtgttccctctccagagaatgctgcggaaaggcgaaaggcacctgctgctgtcatcaaagttcatgtgccaaaaaatcaaaaacaggaggaaatcaagatgaaacttgcagtaacttacgataacggagaggtattccagcattttggtcataccgagtattttaaaatttataccatagaagacggaagtatcacttctgaagaagtcctgtccaccaacgggcagggacatggggctttggctgggtttttacaggagcatgaggtaaacgccctcatttgcggagggatcgggggcggtgcaaggactgctcttgctgctgccggcattgaactgtatccaggggcctcgggcaatgctgacgctcaggtaacagcatttctgtcaggacagcttcagtacaaccctgatacccaatgtgcagatcacgaacatcaccatcatgggggagactgtcacggagactgcagcggtcactgctaagtgctgcttttagaaagacaaaaataaaaaggaggggcatcctcctttttatttgtcttctcctgtcagattcaaaatatcccgtatttcctcctctgtcatttcaaggtaaaatgacaattcctcaatgctgaattttgtatcctcatcctcagtcagctctttcatggcagcttccagacgctctaccttgtttaccatcatctcatctcttcttttctgctcagactgttcttcgtttaattccagaatgcccctgcggatctcttctttgataaatgcatccgcgtccgcctctgtgtccagccgttccacagccagcaggagatttacattgccctcagccacagcatctccaagaaaaatatccggacctgctattttttcagctatctctgccactgtttcaagatacagctctgcaagtcttccttttgccagcgcatcacccattattacttcccggatgagacgggctctctctccttcttcttcctttcggatcagagataactcatttctgtatttttttaaataggcctcttcatccggtgacagctttttcttctttccttctgctaaagcttcgtcacccctgcacccggtgactgtgatgcccctggcaagcaggtattcctttatcatcgcaagctgttctcctgacagactatcctcccggaaatattcctctattctttcctgggacatgcggtcccctgcatcctttgcctcttccatcagcttctccagccttttttgaaattgcagcttatcttccataataacctccaaactttgctctcccggcgtatgccgttccctataccataccataaaggcagagtctccacaagcagagtctccctaaatgtttcattgccaactattgacttttttacagtgagattataatatagtctcataactattatgaaattgaggtgtactcttatgccggatatatccccggacgatctcctgaaaatgacatctaccatacatagaaaaacccagatgtatctgaacgaggagactaagacactgggagtaaccagcggtcagactccctttatcatgattatctgtgaaaacgggaaaatggttcagaaccagttctgcgagattctagatatggataaaagcactgtagccaaaatgatggccaagctggaagccaacggttatattacccgttcccccaatcctaaggacaatcgctccattgacatttgtcccacctccaaatctcaggaactctatcctctgctgaagaaaatcggagaagactggtctctgaaattaacaaaaaacctttccgttccagagaaaactgttttcattgaaatgcttaaaaaagtcacagacaatgcagttaatatgtaagaactgaataataaatccagggagtttttccctggattatttctatcttctggccagttctctggtaatttcctcccaggttacatccttttccgccataagaaccataacatgatagagaaaatctgagatttcatacttaatttcttccttatccggatttttggcggcaatcacaatctcagtgcattcctcccctacctttttgagaattttgtcgattcccttatcaaaaagataattggtataggatccctcttttggatgtacttttctgtccagtatcacatcatagacatcctgaaaaaccttcagcggattggtatcctcatactcctttttcaccagttcctgaaaaaaacaggtcctgcttcccgtatgacaggccgcccctacctgggaaacttttgcaagaatggtatccctgtcgcagtccagtgtcaaagattttacatactgaaaatgtccggaggtcagacccttcatccacagctcatttctgcttctgctccaataggtcattcttccagtttccagagtggtctcaaaagattcctgattcatataggcaagcatcagaacctcactggttttgtaatcctggacaattaccggcaccatcccatcactattcttcttaaaatctttccacgcaatccggctctcccatgtatttaccgggatacccgccttgcggcaaaactttttcagcttcatccgatcagtcttgggatcactgacataagcgcccgtgactgctgtgacacctgtctgctgtaaaacctcaagaaccgcctctctttctttgggaagaactgtcacgagaagcgccccctcccagtcttccctgaaagactgccagtcgttggtaagagacagaatcatgtccgcatagcacttcagcggctccaggttcctttttacctgctccggctctgacactgctgccgctatcttatctttcccgaaccgcttagacacctcttccagcaattctatatttcccggtttcgaaaaattcaacacagctcttttgcatcctgcatagagaagctttttcacatcttccatacgcctgatatggccggcgccaatgacaggtacctctgcattctctgcgatctcccgaatctttccaatggcagcgtcatgctcttcatctgtttctgacaaatcaaagaccaaaacttcatctgctccctgattcccgtataatctgcccagctccactggatccggcacaacaaaagcttttgtggcctcctcacccagtccgcatacggcctgtccgtgtttcaggtaaatacagggtattaataatttatttctcatactaattttatctcccatttctgtactttaatgtacggcagtcttcacgaaagagtcccctttgttgacagaacgtctgttattctcccatcaaaagatactgccgcatccaaggcctttgcgaatgccttaaacagggcttctgccatatgatggttattccctcctgtaagaatcttcatatgaaggttcattcccgcactgtaagagatggcatagaagaattcacgaatcatctccgtctccatatctcccaccttatcccttgtaaattccccttcaaaagagaagtagggccgtccgcataaatctatagcgcacagtaccagtgtctcatccataggaagtatcatgcttccgtatctgcggattccctttttatcccccacagcctgggcaatagcagtgcccagcacgattcccgtatcctctatggtatggtgatcgtctacctccagatccccgtttacctttagggtaaggttgaacagcccatgacgggtaaacccttccatcatatgattaaaaaatcccacaccggtatcaatagaactgcttccgctgccgtccagctccagagtcagctgaatctgtgtttccttggtatctctggtcacggttgcctttctgctcatagcgttctcctttccttctatctgtcctcatcaaaacgcacccggatagaattggcatgagccgtgagctgttctgactcggcaaactgtataatatctttatgaataggcgcaagagcttccctggaataataaatcacactagattttttcacaaaatcatccacccccaagggcgagaaaaattttgcggttccattggtgggaaggatgtgattgggacctgcaaaatagtcacccagaggttcgctgctgtattctcccaggaaaattgcccccgcattttttattttagtcatcacatagaatggatctctggtaacaatctccagatgctcggaggcaatggcgttggcagtctcaattgcctcctttaggtcttttgcaataaggatatatccaaaattatccagagatttttcaatgatttctcttctggaaagtacccgcaggaaattatcgatctcatgatttactctttctgccaaatcctcgctggtagtaaccagaatagcggatgccagttcatcgtgttccgcctgcgacaaaagatccgccgccacatatctgggattggcggtttcgtcagcaagtaccaggatctcactggggccagcaattgagtcaatgctcacatgtccatacactgctctttttgccagggccacataaatattgcctggacctacaatcttatctaccctgggaatgctggccgttccgtaagccaatgccccgatggcctgtgcgcctccagctttataaacctcatctgcacccgcctcatttgcggccaccagcaccgccggatttacctttccttggctgttggccggtgtggtcataataattctctcaaccccggcgactttggccggcactatattcatcagcacagaagaaggatacacagctttgccgcccggcacatatacaccgaccttccccatgggagtgactttttgtcccagcatggtgccttccccgctggtgtcaaaccagctgttacgcttttgcttctcatgatacttctgaatattgacaagggccttgcgaatcacctctgtaagagcaggatctgtctcttcatatgcccgtgcaatttcttcctcagtcacctgaatattggatgcatctgccggaaacttgtcaaattgccgggtgtattcaaaaactgcctcatctcctctttccctcacctggttgaggatctctgttacccgcgcctcataagcaccgtagttggcggggcttctttgaagcatcgtttccagtatatctgaaatagcctctttcgttaattttactgtcctcatgttatctcctcactacagcacagactttagatctgtaattattttactgattctgtcattttccatcttcatactgacctggtttactaccattcgcgcagagagggggcatacctcttccaaaacctccagcccgttctctctcagggtagaaccggtctcaacaatatccacaatcacttctgacaatcccacaataggagccagctcaatagaaccgttcagttttataatttccactgtctgatgcttcttgttataaaaataatctttggcaatattgggatatttggtagctacccggatcagctggctgtgatgtaaaagctccctggctgactggggcccgcatacgcacatccggcatttgccgaatcccagatccaggacttcgtagagctttcttccctcttccagtatcgtatctttccccacaatgccgatatctgccgccccatactctacataagtaggtacatccggacctttggacagaaaaaactttaattttaattcttcattaacaaaaataagctttctggagtccttgtccttcatctcttcacaggtgattcctattttttcaaataactccagggttgtcttggcaagacgccccttacctagggcaaaggtcaaatatctcattatactttcctctcttctcataatcctctttggttcggcccggatctctttgcagaagttctgcctcccctcctttttttctccaggaggcagccatggcaattgcctctttctgctgctctttagtatataaaatcagaatccttttggtctgcacaggtatctgtattccctgacgggatagtgcgttcataagattttccatgacaatggtaaatccaatggcagctgccggctttccgaaatgcccaagcaggtgattgtaccttccccctttgattatggcatcccccgtcccatatgtatatgcctgaaagataatccctgtataatactgatatttgctcagcatggataagtcaaaggatatatacttctcgcatccgtaacaggcgaggacctcgtaaatctcttccagccgttccagcgctttcactgcctgtgtattccttgtaagcgtcttagcttctgtgagcatttccactcccccgtaaagcttaggaagcataagaaatgccttttcaagttcagaattcaggttcagattagagatcagttcctccactccaaaataatttttattggaaatctgctggcgcagctgttcttccatctcctcatccatacctgcatcttctaacagagatttaaaaaaatccacctgaccgatgctgatctgaaattccctcagtcccgcggttaaaagcagctcaaccataagcgccagaatctccccgtcactctgtgcagaaccatcgcccacaaactccacccccatttgggtagactcttttaaccggccctgatagctggagttattgataaaagtattccccttatagcacagacggaggggaaattcttccggcgtgaagtacatagataccgcccgggcaatggacggcgtaaagtccggacgcaggaccagagtatttccctcccggtcaaaaaatttatacaaatctttggagggtatggttcccacctcacggctgaaaacatcaaagtattcaaaggtcggtgtttctatgtcctgatacccatagcttctgagcactgtatgtaaacgttcttccagaaccagcttttgttcgcattccccattatatacatctcttaccccttccggcgtatgaaacattctctccatattattctcctttactttatcgcgttaaactgctaattcaataccatattagcaaataaaattataaagaaactttatccgtttgtcaatcctgtattttaaccgtcctgcctttactctctggacagaagatctttttgcagcccctccagaaacggcaccaaaaagccgtgcccgctggtaaaaaaatattccggattgagctcttccagggtaaagtgcttacgccccccactttgtccccgttcccagaatctcagcatgtcttcatagcgtagatagtaaaattcgtttctcctggtaaaaaaaagaataaggaaggcaatgcctccctgtccctcaaactcacccataaaatccacctgatgctggtggatattctgcagaggaaattgattggaatggcattcctttgcatcaaagcataccggaatgccctgcactgcaccaatataatccactgtacttttcttctcaaaataggccagtgtaatatggcggctttccttatcaattttcacaggagtgataggcgtggggattttctggatcactgccagcttcttttcccggtattgttcacaggtccggttaataaactcttccagggtggaaccccgaagccctctggaattccaagtactcatagcaatctgctcctgtatctatttaatccgtttaatcgaggggaaatagcggattaccgctttcccaagtatcttatctttctttacataggtgtttgtccagaatctggagtccttggaataattcctgttatcccccagcataaaataagatccttccggaacctcataaggcccgtagcttccggccggagtctccggcgtaaagctgtcgtccagcggggtatctgagtcattgatatacacctttccgtctatgatcgtaaccgtttcccccggaagtccgataatcctcttgataaaaagctggctttcattgtccggatatttaaaaatcactacgtcatagcgctccggatcctcaaaaagatatgccagacggttgccaaagatcctgtcacctgtcatgattgtcttctccatggactctgagggtatctttgcattaatcagcaaaaaattattgataacaaagacaaccgctaccacgaagataatcattttaatatattcccataattccctgccgatggatggccccgtattttttttactcattcatgtatactctcctctatgtgttctccctccagaacttttttcatatctgaaggtattggcgccgtcagcaccttgtgggatagatagttcagttctcccttcatctcaggcattgtaagccgatatgcgtgaagcagctgggacttcacaccgtagctgtcacggaacagctggttgctctttttgctgccgtactttccatcgccaatgacaggatgtccgatactggccagatggcttcgtatctgatgggaacggcccgtgatcaaatgtatgttcaaaagagttaccctctgattgccggctaagggacggtactctgtttctataggaacacttccctcaaacggctcattttctactactactttattacatttctcatctttatgcaaatatcctttcagatatgccccggagggaaccataccctccaccaaagccagatattcctttctgagggaacgcagcttaaaggcctcattcatctcctgaaggcctgccagggtttttcccgcgattacaataccgctggtatttcgatcaagacggttgcatattccgggatgaaagcatctgaaatcttcctctttcatctgtccgctctccagcagataaccggtcaggtactccaccagtgagacatcgctgcctgctgctttctgggataacattcctgagggcttgttgactgcagctatatgtttatcctcatacaggatggatagtttcccatggctcctttccacttttacctgtgaaaacttgtctatggtctcatctgagagaaagaggcgtacgatatcctgctccttcagcttttcgcttccggtggccttctttccattcagtgttatattcttttttctaagcattttgtagagaaaacttttaggcgcctcgttgaggtatttggacagatatttatcaaatcgctgtccggcctggttttcccctatcacgatctctttcatgggtgcacctacagggaaattgcatagatagtatgcagaatcagttcgtttctggtaagctccggataattttcatcgggagtaaaccggatgtccttctcaatactctctctgtgctcattgagactgtccaaccgttccagatagcctttcagttcccggaacactttcacggatacggaaaagccattttgtttcaggattttctgtatatgcttttccgcaaaaggtccgtcggtcttatccctgctgctgtaagccgccacggtattcccgcagaccacaacagcatccagaaagctttgtttctcgtaggcagtcaccaccagctcatacccgcatgtaagctctcctttatgtgcctcaatggcctcataatcttcttttttcattggtttctgcatgtacatcataatactgctcaccgccattttacaggcaggcaggcatcccaggactgcaatgactgtaaaaatcgtattcctgctgcctttgagaaccagccctgtaaaaaaaactaacagaggggcggcaaataatgccagggtaatccaggttctttttattttctgggcacggatatagccgtagctgcctttggttgctttcatgtaaatattgtccttctttctcttatagtatcagattcataacagcaagcagcacccggtgaggaatgatcctgcacagcacatacacagcattcatgggtacaccatagacagacaattcctttccgcccgccgcgtccaggattgccttgtgtactacctgatccgcctttgccatacatgacttcttcgcaaaggaaatgcttccccctgctttctggaaaaactcagtgtccacaggacccggacacacagttgtcactgtaatcccttcctgttttacctctcttcggagtgcgcgggagagactgagcacataagactttgtagctgcatagactgccagtcccggctgaggtacaaaggctgccgccgaagctatctgtatcacatgacttcgctttccgcagtaaggaaggcacaaagttgtcatctttgtaagtgcggtacagttcagggtaatcatgccctgaatggtattcgtggtacattcgcttaccttgccaattttaccaaatcctgcggcatttaccaagaccttaacgtgaggtttttctgtttttaacaatttctgtatggtaaaaaagctgctgtcttttctgagatccagaggaagaatccgaagctttgcatctatccgcttctgaagctgtttcagattctcttctcttctggcaatgacccatatctcatccagccatggatagcagtaagagagctggcggacaaattcctttccgatccctgaagaagcacctgttacaattgctatttgcatattcatcttcccttctttttgtggacattacgaatggttttctttctgcttttcttctgcataccaggtgagacctgttctccttttcggggctttataagacatttgggaccaaatccaatgagatctttgcgtccggccagttccaaagcctttctcaccagttcataattctttggatccctgtattgaatcagagccctctgcatctccttctcctggggatcccggggaacataaatcttcttcatcgtcctgggatccagtcctgtgtaatacatacaggtagagagcgttgccggtgtgggataaaagtcctgtacctgctcaggcataaagcccatgtcccttacatactctgccagcttaaccgcatccttcatggtacagccgggatgcgaagacataaagtaagggaccgcatactgctttttccctgctttgtggtttgccgcctgaaattgcttcagaaaggtgagatatacctcatgccctggttttcccatggcatccagcacaggcttggacacatgttccggagctaccctgagctgtccgcttacatggtacatggccaattcctccagaaagcggggatccttgtccgccgtcacatagtcaaaacgaattccggatcgtataaaaaccttttttattccaggcagctctctgagttttcgcagcagctgaaggtaatcttcatggtccgccttcaaattgccgcagggctttggaaacagacactggcggttggtgcatacccctttgcttaactgctttttgcaggatggttgccggaagtctgcagtgggtcctcccacatcgtgaatatatcctttgaactccggatcctcccggcaattttctgcctctctgagaatagactcatggcttctcacctgaacctgccttccctgatggaacgtaagtgcacagaagctgcagcccccgaagcatccccggttgctggtcagactgaacttaatctcctctatggcaggtatcttacccattttttcatacaagggatgataagttctcatatacggcaaatcataaatatcatccatctcctgcatggtgaggggagccgccggtggattctgtacgatacatcccttggtgccatagctctctatcagagttttcccggtaactgcatctgtattctcatactgcagagctacacttctggcataggcctccttgctgctgcagatttcctggtaatccggcagacggactccctgatagatatgctcagtctcttttgtccggtatacggttcccgggataaatgtaatctcctccacaggaattcctgcagccagcgcttccgcaatggccaaaatagagtgttctcccatcccataggaaatcaaatctccgccgctgtccataagcacggaagccctcacctggtcagaccagtaatcgtagtgggccattctccggagggaggcttccatccccccaagaatgatgggagtttttttatacgtctggcgtataagattactatagaccaccactgcccggtccggacgcaggccggataagccaccgggagaatacgcatctgtatgccgtcttttttttcctactgtatagtgattcaccatggaatccatatttcccgcagatacaagaaatcccagccgtggttcaccgaattcccgcacgctttctttccgcttccagtccggctggggaagcatgcagacagaatatcccctggattccaggagtcggctgatgatagccgggccgaaggatggatgatccacgtaggcatctccaatcacatagacgaaatccggctgttctatgcctctttccagcatttcctgttttgtaatgggcaaaaaattcatcctattgtcctcttgtctctccttatacttcttcgtatgtcccgttaatcacatcataatatgatgtgatataatagtcagccagccgccgcttctcttcttcctgatccctgctgaaagcatcctccaccgcgcaggtactcatacctgcattctttccggcaagtatgcccataggaatatcttcaaagaccatacattcttccggctcaacctgcaaatcctccgccaccttcagatagatatcaggggcaggcttcccgtgagggacatcacagcatgtacgaatcttatgaaagcatccgtcaatgccgtgggtttggagcactgcctctaccagttctatgctgttgctggaacaaattcctgtctttatccctttttctttcagtacctttaaaaactcaggaacccccgccttcagaggaacctcccagagatacttgtctctggccattgaaagccaaatttctttaatttcgccgatactctccggtatatcaaaggtctctttaaaatacaccgccgtctccgtaaagctcatgccttctatgtccctctggagaccgggcggaagttctttccccagccttcccagatacaagacatctatctccttccacatccacatggaatccactaacgttccgtctaaatcaaataatactgctttttttccctgtagcatcttcccgcagcctctccagttcttcctttgtcagcggacggtatgcccccaggggcagtgttccgtccagatacaggcttcccatagaaagcctttttaagtataccacatgtttccccactgcttcaaacatcctttttatctgatggaaccgcccctcccggatggtaacccttacttcacatccatccccattctgttctatttccagcctggccggaagcgtgagcttttcatccccgatatccagtccattttggaaggcctcggcgtccttgtgttcagccgggagatccagacgggccaggtaagttttatccacatgttttctgggagaaagcagtctgtgagccagatcaccgtcattagtgataagaagaagtccctccgtatctttgtccagtcttcccacaggaaataaatccttcctgctttttacggtaattagatccagaaccgttttttcctgccgatcctctgtggcagacacataaccggccggtttatgaagcatataatattcaaagtctgtgtatccaatcctgctgccctctgcctccaccacatctattcccggatccaccttaaattcaggacgcagaatctttgtgccgtttacacttaccctgcccttgccaatcatctgtttgacctgactgcgggttcctgtccccatatcagccagatatttatctaaacgaagcatcttactgccatctccatcccggataatatttgttcttcaaaattcccccggacaattttccccatcccagaggaaatccatccacacaaaccagctgccagccctttttacggggggcgtacaggtcgctgacctcaatggtctcccccttcagatatcgaagggttctttcgtctgcggagggcaaatttatggtggaatcatactcttccctcttaagagccatagccagagcctgcccaggttcgaacctgtttttcttcctctcccccagataaagtcctgtgcggagatacctgagtctcccgggcatactgctccctccaggcagatagtatactttatcctgcaccatataaaaccggtcctgctcaaacggacggctgatcccctgaagaaactcccgcacctccccgggtatgtcttttcctgcactctgcccgcaggccgctgtgattggtttgtaattttctccagccttttttaacagtgccataaaatggccttccccattcattttgtgggggaagatcctgacacaggaggaaagccccacccccggggaaaacccttcataaggcgctatctcttccagagacagatccggggccttttccagaagaaattgaatcacctcttcgttttcttctctggaaaaggtacaggtagaatagagaagcatacctcccggcttcagcatagcggcagccgccagcacaagctccttttgcacagagctgtattctgagggacctttttcttcccactctttggccatctccggcctccggtggaacatcccctccccggagcacggggcatccactaatattttatcaaaaaaacagggcagctgctgcttcagctttaccggatcttcacaggtgacataacaattctcaagccccataagctccaggtttttcagcagcgcctttgcccttgagctgctgatgtcattagccaccagcataccgctccccttcagtctggcacccagctctgtagccttgccccccggagccgcgcagagatccagcacaatatcaccctcctccaccggaagacggctggccggggtcatagcactgggctcctgcagataataaagtcctgcataataatatggatggcgggagggcttttcttcctctttataatagtatccgttaggaatccagggaactttttccacagaaaacgggcttatcttctcccattcctcctcagacacctttttctgatttattctcagtcccagccgtacgggtttatcataggtttccagataactttcatattcttcccggagtaaatttctcatactctccgtatacttcattggtaattccatgcttaatatccttccaaatcatcttccagtgtaactgcctgtgcccggtacccctcggatataatgtccagctgcttgtgaaaacgctccagctgctcaatatccttagccgaataaatgcggtagaactcatcctgtatcttcgccacttcccttttattggaataccggtaaagattctcaatattgttcaggatatcagccaccaggtttgcctgcatttgggaggagttctgtgcgtccataacctcgctcctcacagatgacatttcccgatcaagggcaatgatagcatccgcagccttgctgaggcgctgggtgagatgttccggcatatttcctttatatttatactggagagaatgttcaatggttgcccaaaagttcatcgccagagtacgaatctgaaactccacctgaatttgttttgtcccctgaaaggtttccacgttatagtaaacaatcatatgatagctgcggtatccgctctctttcatatgagtaatgtaatctttttcatacttcacagacatatcgctgcggcttctgataatctcaaccactttttctatatcttcgtaaaactggcagataatccgcattcctgcgatatcctcgacctgcacttccatatttccccaggtaatattcttcctctgcatcttttctaatatactgttaatgctttttacccggccggtcacctgctcaatggggcagtagatatccagctgccggtgttctttgatcaaatgattaaacttgacagtcagctctttcactgccagctcataaggattcagaatttctctccacaattgtatttccatagttctttaaatctccttacctttccgtcacagaagaatcattcccctatgggcggtaacgtcacacggcccacttatgctattatagcataaaaatcatttctgtgctttttaatatagatacctgcgcctgtttttctcaagatatttcaggactatgtagggatcaaccgggtattctgcctggtttcccttctcaatataaatgcccagatgaagatggggagggaattttcctgtggtcccctcctcaccgtatccggtatcccccatgaagcccagcagttcaccgcccttcacagattcgccctcctggaaatctctggcatagccgtacaaatgagcataataaaagtagccgcccgaaggacttctcactccgatccggtaaccgcccaaaggaagccatcctaccttttctactatcccgtctgttatactgagtaccggataatatccaggcttctcatttgagccgaatatgtcacagccctcgtgctttctggtccccccatagtttctctcctccagccaggtatcctcatacgagaattcttccccaaggatatccgacggaagaggaaaatacttgagatccttccagaaagtaccataatccttcatttcctcccggtttatcccctcttctctcataaacgcaaggggaatccccatctttttcaattctgcgtcagcagctttgtttcccaaaaaagcacttcctgcaatgtcgaaaaacagtacaattactaaaagaaagaaggttttacgcaatttgcatccctccacctctcagtctatgcgtcagggcagaaaaaaagaccaaaaaagtatcttctttttcagtcttttttctctgtttatctgatgcgttccaaaacgctgcacagatattcccataccctctttgtggaggagatgctcaggtgttcctctgttgtatgaatgtcaaagatatcagggccgaaggaaatacagtccagtccgggtatcttttcaaagaagagtccgcactcgagtccggcgtgtactgccttgacctgaggctccttttggaataagtccttataaacctgaaccatcagctccctgaggggagaatcctgacggtactcccaggccgggtactctccctctgcatcataatctccgcctaaaaattcagtcagatactgaatacgttccgcgattgctgtcttcccggactttacggaacttctcacgctggaggaagcacgaagttcatttggtgttagttccagaatccccagatttgtggagctctctacaagtcccggaattgtgccgctcattttcaggataccgttgggaatatgcatcagataaaaaatcaccttttccagactgccgggatgaagcgcaggctctgttcccatcccctgcctctcaaccgtcacggtgatcccttcatccgtccctgcatattccttttgcagtgcctcctgaaatccggcggcagcctcaaacagacgctcttcctcctctttcggaagcatcaaaagagcgctcgcctctctgggaatggcgttgtccttcagtccgcccttcagctctgaaagcagatatcccacatgctcccgcagttcaaaaaggaatcggcccataaggataacggcattggctctgatcttatcaatttctgcccctgagtgtccgccgcagagaccgtggatcttaaccctatatctgtgatctgctgcttctatatatcttacaggaattctgctcactgccgtaagccctccggcacatcccacccagagacaggattcctcctctgagtccagattcagcagaagcttccccttcagaggggatgcatccagagaccctgctccaagaaggccaatctcttcatcaaccgtcaccactacctccaggggcgggtgaggcagcttgtcatcatccagaactgccagggcataggctactgcgatgccatcgtcagcgccaagtgtggtatcctttgcagaaataaaatctccctctgcctgaagctccagaccgtcttttgtaaagtcatgctgagatcccggctttttctcacaaaccatatccatatgtccctggagaatcaccacgggagcattttcgtatccaggcgttccctcctgaaagataatcacattattattcacatcctgaatatatcgaagcccgcgggcttttgcaaagcccacaaggtaatcactgatttcttttgtattcccggaaccgtggggtatccctgccagttcttcaaaaaaccggaataccttcactggttctatgccttctaattttgccataaaagcacctcctgattttgtctttctacattgtgtcacaggcaaataaaaatagcaagcccccgccgtgagatttctcaagtttaaacctattttcccgtctcttctcatatactatgagaaagacaatttcctgctggagacaaaaatgaaaaaacgctggtatcttcttcctctccttttacttttgttctttctcctgttttgtccggaaatagcatttgcagcttcaaaaaggggacttctcctctggtttcagagccttctcccctcgcttctgccttttatgattctgtctaacattctgattaaaacgaatgtcctggaaaaatggattgctctgcccaaaaaactatggaatatcctgttcggtctctcccccaacggagcttacgctctccttctgggggtgttctgcggttatcccatgggagcaaaggttacggcagatctgtacggcagcggaaagatcagccgggaagaagcctgctatcttctaaccttctcaaatcacccggggcccatgtttgtatcctcttttcttcttctggaaaccctccacaaggaggagtacatagggatcagctttctgatcctgtataccggcagctttatcacttctctgctcttccggtcaggatacaaaaaaaaagaaagccacctgacaaaacacaaaaaagaggtatcccggcgtcctcctctcggagtcatcatagatacctctattatgaatgggtttgaaggaattacaaagcttggaggatatattatcctcttctctgtatgcagcggaatgatacagaccttcacctttttaccggcgccccttcgatatgccctgctggggatcacagaaatctccaccggtaccgccgccatcgctcagaccgcctgtcctttttttctcaaatacgcaattatcatggctcttacctccttcggaggcctatgtattatggcccagacaaaatccatgatcaatgagacatctctgcctctgatgccttatgtgaaaggaaagctgtgcagtcttgcaatcaccttcctattagcgctattaatcgtccaaatcgtctaaatcatccagatcatccagaccttctacttccatatcgtcatccaaatctgctgacgaaacagaggtggaagcctgcgctacctggggagcaagctcattgcggtttttattcacaacctcgtaacagttctgaagagactgtacgaaagaattatattttacagccacatcttccagtgcaccgctcataatctgtcccagatttgccagcatatcatcggtgtaggagattgcgcttaaacggatgctgttggcatcactggttgcagaatccagaatctcctgggcctgacggttcgcattgttgatggtctcattcgcctgggcataggcctgctgcataacctcagactggcttaccatctcctgggtctgagcttttgcctctgcaatcagtccttctgccttcgcctgggcatctgccagaatagcatctttgttgctgataatcttctgatatctcttaatctcgtccggtgtcttcagacgaagttctcttaaaaggtcttccagttcttctttatttaccacaatcttagttgtagataacggctgaaatttacaggtttctacgtattcttcgatctcttcaatgatttgttcaattctgctgctcattttttacactccttattgtacattaattattttatcccttgaaacttttcttttactttttcaactgcataggggggtaaaaattcggagatatcagcgccaaaactcgccgcttccttaacggtagaggaactcagatatgcatattccagactggtggtaaggaacatagtatcaatatccttgtccagaatcctgtttgtctgtgccagctgcagctcgtactcaaaatctgtaatagcccgcaggcctcttacgatcactttcgcattgcactccttcgcaaagttcacagacaacccgctaaaggacttaatcttcaaatttggtatatcctccgtcaccttcttaagtatattaacacgttcttctgcagaaaacaacggactttttgcagaattattcaaaacgccgacaattacctcgtcgaaaagcctggttgcgcggtgtataatatccagatgaccaaatgttaccggatcaaaactccccggataaattgctattgccatttaatttttctccttgtacctttttataaagacgtgggtattcgttttatatttcttttgcttgactatggtatatcccatttcttccagatatgaaaaatctgtagaaagagatgcttctattataaataacgtattctctgagacaaaagatttgtccttgcatactgacagcacttctttttccaactccatatcatagggcggatccataaaaatgcagtcaaaagcctcttcctgttccagctgacccagccctgtaactacatcggtatgcattaccctgctcctgtcctttacccttgtaaaagcaaggttctcctctatgcaggcgtaagccttacgatttttctcaataaacacacaaaaagcagcccctctgctcaaggcctcaatgccgatagccccgctgcctgcaaacagatccagaaatctgcagtctggaatttcaggctgcagaacattaaacaaagtttcctttgtcctgtctgtagtaggccgggtatccataccgggcactgtcttaagcggaaggcttctcgctgttcctgctatgactctcatattgtattttcctgtctttctttcgtcaaagcgaatttatacttgtgtccgccagtccaaatcacctctggccagtcccagaatcagagattctgccgttgctatgttagaagctacgggtatgttgtactggtcacagcatctggtaatctgatatacatccggctccttgggatcgatcatggaaggattgtaaaagaatatcaccatgtcgatatctccccgctctatcatctcagtaaactgcttgtcgcctcccatacttcccggaaggaacttatggacatgcagattcgtcacttcttcgattcttcttcctgttgttcccgtagcgaatatctcatgctttgccagtatattcttataggcgatgcaaaaatcttcaattaacgcttttttgctgttgtgagcaattattcctacattcatattgttatcattcccttgattttctacgttttctcaatcattataacaaataactaaataaatcgcaaacttttttctgaatttatgcgaaattaataaatctctcaaattttgctaattctagcaagaacttctagtgtaaaaataaacatttttcacatactatccttgtaacaaaaaacaaaaaaagatttcaaggaggcaatttattatggcaaatcgttcttctaataccgcagcagtaccagaagcaaaaggagctttagaccgtttcaaattcgaagtagctaacgaattaggagtacctcttacagatggttacaacggtaacttaacatccaaacagaatggttctgttggtggatatatggttaaaaaaatgatcgaagctcaggaaagacagatgtccggcacaggcatgtctggttcaggcatgagcggaacacagttctaaaactcatcaaacaaaaagggtaattatttaccaaaagaaaagagaggctttcccgtgggacagtctctctttttcctttttcgtttctgattacagatcaatactgcctgtaacctcctggttgattacataataaacagtatgttcttctggttttacatataatttcagatccgtaaggtctttttccttcttgcccaactctttagtccagatatcttttactcttgctgtcagatcctttgtcagaatctccttgcccccaaactgcagatatatgctttcctcaaccgccggtgcttttttctcagccggtttcttcgctgccggttttgcagcaggcttcctggccgccggttttttagcctctgtctttttggcggctggtttttttgtttccaccggtgctttttcctctgcagctgtctttgcccctgtagctgctgcggtcgttttcacttctggtttagctgctggtgccgctgcttttgtgatagttgattgtttcgttggcataataattcctcctcaccatcttttctgacctagttcaataaatttctttctcataataaacctattctgcgaatttttcaagtatttcctactccacactcttcatagactccaccatatttattttttttaatttaaaatgcatagcaaaattcacaagaaatgaaaagaaaaatgtaaggataatgctgaatatataactctttggttctatatttctgccaaacatcattatgtctatttccgcagtcaaaatcacaaaataatgcagcattcgtccgaaaataacacctactatgctcccgatcagagtcagccatatattttccctaatcatatagcttgagacttccatgtcataaaatcccagcaccttcaaggtggcaagttccctcattctctcacttagattgatcgtattgagattatacaaaacaataaaggccagcattcccgcggatataaccagcacatagattacggtatccatgctcttaagcatatccgcaatcctgtccgccaaaccggagaggaatgagatttccgtcacttgttctttctccatgtaacgtctctggaattcctcctcaaatttctcgctgtcagaactatttatggtatagatctggtgaaactcaggttcttcctgatatattttttcatataaggcaggtgtaatatatacataatgatagaaataattttccgttatatgacttacctttacattcagcttgtgagtctcatcctttttcagatagatctcatcccctgctttcacatccagtaattttgcaagcttctctgtgataatcaccccgtcatcggtaagttcatagggtgtttttgtcagtctgtccctaaggctgataaattccgtcaggcgcccgggctcctgggggatcaccatataagagcttttttccgttcctttgctgcccacatccacggacgtctcacaaacggaaagagagttctttatttctttgtcattcttcacaatttccagaagctgattctcttcctcctctgtaacgtcgtccttcatagctatgctggcactgtaattgcggatactgccaaactgaagcgtgccgatagacttaatggaatccttcagcccaaagcctaccagaagaagtcccatacatcctccgatccctaagactgtcataaaaaatctttttttgtaccggaacaaattccgaatggtagacttgtttgtaaagttcaggtgacgccaaaggatcccgatccgttccagaagcactcttttcccgcttttaggcgctgccggccgcatcagctccgccgggcaggcgttcagttctttgtagcaggcaaacacagtagctgccaccgtacagaaaatcgcagcggcagtagaggacagtgagtaggacaaatgcagcggattcagtatctgcggcagattagtatacaaaattccataggcattgataattactaccggcagcagtttctgtcccagcaccagacctgtcaggcttcccagcatagtggctgaaaaagcataacagatatactttgccgctatggaaaacttcccgtatccaagcgcctttaaggtaccaatctgaatcctttcttcctcaaccatacgtgtcattgacgtaaggcagatgagagctgctaccagaaagaagatgaccgggaatacctttccgattgcctcaattctctgggaatcctgatgatattccacataagattctatgtaatttctgtctaaaacataccactccggaagctccagttcccgaagctctttctccgcatcctggattttactcttggcatcggcaatctcaggctcagctttttccttagcctcttcgtattcctgctttccgtccagaagttcctgttctttatccttcaactcctgtttggcatcccttagctgatttactccatcctgccattcttcttcggcatcggacagcttttgcttcccatcctgccattctgcttccttttcctccagaagctctgcctgcccagacagctcctcccatcccccattcaattgagactggccatcttccagctctgccctggctgcatccagctgttcccagccgctgtaaagctgtgcctttccctcttccagttcttttttagacacagagagctgctgcctggcggcagcttcattctcttcgattatctttttgttcttttccagctctccgtagggatctgcgaattgactctcaatggctttcatagcctcggcaacagcgctctcctgggcggcagatatagcggccgccagttgcgcatctgcctcctcctgggtcataagtccgacttccaccgccgccttcagactctcctccatagcggcccttacgctctgttccgcctgttctcttgcctgcagctttgcctgttccctagccgaagccaatgctccgtccagggcttcttttccgtcgttccactctttccaggctgcttcaatttgttctccggtctttgcttcgccctcctcatacagcgccagccctgactcatactcctgctgtttttccttcagggtctgttcgttggcctcaatctgctcccatccgtcgtatatctcctgctgcttctcatccagctgctcttcggcatcttctatctgggcatatccgtcgtctatctggctgcgcccttccaaaagaactgcctcattgtcgtccaactcctgttttccgtctgccagcttctgttcattctccgcaatttctttttttccgtcctccagctttgcctggccgtcctccagttctttggcagcatcggccagcttttgttcattgtcggcaatctcttttttagcatccgcaatcttatcccggccctcctcctgtattccgtcatagcgcgcctgacatctttcctcagagatatcttcaagccgatcctgcacctccccaaccaaatcctcataagcgtctgaggtgtcgagaagctccctggcgcctgtgactgtcaggcaaagttcagtatatgcctcaatggcaaaacaatctttgggaagaaaaataaagctgttcagattgccgttaccaatcttcgtggttccccgatccagactcagataataagggatacttccgctgcctacgatcttataggaagtctccttcactgtgtctttgatatcatcctctgtccctgaggccaccttaatggtgtctccaatctgatatcctgtattcgtaataaactttgtgtctaccagacactcctgattattttccggcagcctgccctcctctatctgtatctcattcatagattcaggcacagacatgagacgtactacaatctgggcatcttccagatcacaaagtacgtctgctgagtaaccgccttctgcgctgcttacaccttctatgctgctgacagcttccacgtcctcatcggtaagtcccaggctgctcagaatccgcagatccataaaattgctgtcgtcataaaactgatccgccgacagattcatatccggactcgcagcacggatgccggagaaaaaggcaactcccagaaccacgataagaagtatggaaaaaaagcggttctttgtttttctcaattccacaaaaaagtcttttttcagggcattatgcttcactacatcactaccattctatttcttctacgggcgtgggattctggttttccgccatactgctcacacgtccgttcttaatttttattactctgtcagccataggggtaatggcctggttatgggttatcacaatcactgtcatttttttctttctgcaggtatcctggagaagtttcaggatggcttttcctgtctgatagtccagagctcctgtgggctcgtcacagagcagcagcttgggattcttggccagcgcccgggcaatggccacccgctgctgttcccctcccgaaagctgagctggaaaattctgcattctctctttcaagcctacgtcacagagggcgtcctcagcattgaggggatccctgcagatctgaattgccagttcaacattctccagagctgtcaggttctggatcaggttatagaattgaaacacaaaaccaatcgcatcccggcgatattcaatcaattttttacccctgaatctgctgatgtctgtgccgtccaccaggacagcaccttcatcacaggtatccattccgcccagaatattcagtaccgttgtctttcccgcaccgctggggcccacaataaccacaaattccccttcctgtatataaaaagacacgccgtccacagcatgaatggtaacttctcccatccggtaagattttttcacattgtccagtcttacaatttccttcatacacaccgccttacagccccagcgtctctgactgagacttcatatatttctccaattcctctctcagaggcctgtgctgttccagggaaagctcgggatccagagccagtattctccctgccgcctcgctggcctcctttaatatattcgcatcctgataaacatctgcgatcttaaactccataataccgctctgacggactccaaacagatctcccggcccccgcaggcgcagatcctcccctgcaataaaaaaaccgtcgttggatttttccagaatctccagccgtttctgaatctcttcccctgcctctttgtgcataaaaatgcagtaagactgaacatccccccgtcctaccctgccccgcagctggtggagctgtgcaaggccgaaccgctctgcgttttcaaccatcataaccactgcattaggaacattcacacccacctctatgacagtggtggacaccagaacttggatcttattctctgcaaaagcctccataatctgattcttttccgccggtttcattcgtccatgaagtgattctaccacaatttgggaaggaaaaacagtctttaaacgctttgtgtaatcaagaacattttccgcctccatcccttcgctttcctccaccatgggacagataatatacacctggtgtcccgcctctatctgttgctgcataaaagcataggctttcggccgataactggtatctactacacaattttttataggaagacgttttgccggcagttcatcgataacggaaatatccaaatccccgtacaaaataatcgccagtgtcctgggaataggagttgcactcattacaagcacatggggactcccgcctttcttagaaagtatttctctctgctgcactccaaacctgtgctgctcatccgtaattaccagcgctatattctgataaactaccttttcctggatgagtgcatgagtgcccacaattatcttagcctttccttccgcaatctttgcatatgcctctcttttctcctttgcagcagaggaaccggtcaggagaataggttctaagcctgtcagtccgctgtcctccagcagtcttctcagcccctcgtaatgctgtctggccagcacttctgtagggaccatcagcgcactctggtatccgtttgtcccggcaagaatcatggccagaaatgcaagaattgtttttccggatcctacatccccctgtaccagacggttcatcagggtatggcctgtcatgtccctttctatctcatgccacacctgcatctgggcactggtcagacggtaaggaagctgttctattactttttctgtctcccataccggcttcatatcaaacaaattcttttcttctgtctttttttccttcagaagctgaatccccagaataaagaagaggaattcgtcgaaggcaagcctgtgccgtcccaagaccatgcactcctgattttccggaaaatgtatctgggaaacggcaaaattatactccgacagccgatacgcatttcttacttcttccggaagatattccacagccagctccttctgctccaaaacctggcggagcattttaaccagcattttgtttgtgatgcccgctgtgaggctatagacaggctgcaggccattctgcagcttttcatactcctcccgcgtaaagatctgcgggtgttccataaccattctatgtcttttttccgatacctttcctctgaatatataaatcccgccccttttcagcacatttctcagaaaaggcatatgaaaccagatgagctgtaaggtttccccccgatccgtcagaacagtagatactatagtacttttccctgcatttttcacatccacatttcccgtaatccttgccgcgactgctgttttcccggctcctttttccaccgcttcctttacggttacaggttccgtatatctgtcatactctctggggtaatagtgcagcagatcaccaactgtataaattccaagcttctgaaacagcttttcagtcttgtcccctacccctttcagggaacgaagaggtgcattttcttccataatatcccttccacctttttatgtaatattagaaaatctgtgaaaaaaaggtgctgccttggcccacttagccaggcaacacccttctttttctctcctctattctactgatacaatataataatagattggctgtccgccctgattgacctctacatcaaagtccgggtacttatcttccagccgggacgccagttcctccgcatcctcttttgaaacctcttccccatagtaaatgcttataatctcagagtcttcatccaccatctcttcaaccatatgcagagttacctgctctatctcttttcccacagagagaatcttatgatcgccgattcccatgatatccccctgggatatttccttgtcatcaatatgggtatcccggaccgcataagttacctgtcctgtttttacattcttgatttcttctgccattgcctcagcattttcttccgggcttctgtccggaacataattgataagtgcggtaattccctgaggtatggttttggtgggaattacatagatattcttatcttctgtcagatccctggcctgattcgccgccaaaataatattcttgttgttcgggaatataaaaatgtttttcgccgggacacgtgaaattgcgttgagcatatcctctgtactggggttcatggtctgtcccccttcaatcagatagtccgcccccagctccttaaagatctcacacataccttcacccacagacacagagatgaatccaacttccttctccggcactgtctcttccctggcctgctctgcggcaagcttttccgcatcctttatcagcttctcctgatgttcttcccgcatattgtcaatcttaatacgggagagagaaccataagttaaagccttggaaattgcaagtccaggatcattggtatgtacatggatcttgacaatttcatcgtcagccacgaccaccagtgaatcaccgattgacatcaaatattcttttatcttggaaacctcatgctccgaaagttcttccttcaatacaataataaattccgtacaatatccgaacttaatatctgcttccgcctggggagagattcgggtcagtttctgccccgcaggagcctcaaaactatagtcgatttcttttccctggaacccgtcgtaggcccccttcagcacttccagaagcccctgtcctccggaatcaacgacacctgcctctttcagcacaggaagcatctccggggtctgagagaggacatattccgcatggtcaatgatctctctgaaaaaagcatccagatcatccatctcctcagccagttcaagtgcacgggttgccgctccttttgccacagttagtatcgtcccctccttcggcttcataactgctttgtaagcagtctcaacacctttttcaaaagcgtcggcaaatttctgtgcatccagtttctcataatgtgcgattccttttgtaaatccccgcagcagctgggagagaataacgccggaatttcctctggcacctctgagggagccggacgatatggcttttgccagggaatccatgcttattttatccagctgactgacttctgtcgctgccgacataatcgtcagggtcatattcgttcccgtatccccgtccggcactggaaatacattcagttcattaatccactctttttttgcctccagattctttgctcccgccaggaacatcttagccaggacgcctgcatctatggtctttgtactcacaacaagttcctccttaattaatcaattactcgtacgccttccacaaggatattgatcttctcaatctccatgccggtaaaggcttctactttatatttcacgttgctgattagattgtcggacactgcggaaatactaacaccatatgccacaattacgtgaaaatccaactctatcttattgtcactgatcgtcacattgattccgtgctttaagctgtcctttttcaaaagcttaacaagcccgtctttcatgctgacagcagccattcctacgataccaaaacactcaacggcaacacttcccgcgtacgtagcaatcacatctgtatcaataactattttgcccaatcctgtatcaatacaaccattcataccggacacctccactatattattcaaaatccggttctgtgccaagacgccaatcttccggatcatgttagtattataacctgttttatacaaaaatgaaataataatttgaattttttatatttttacttgcaaaaagcgccaccatctgttaaaataactattgttgtgagtctgtattaatagggtatatcagacttattttatatgtcaaggaggtgctatcatggcaaagtgtgctatttgtgaaaagggcgctcatttcggaaacagtgtgagccattcccatagacgttctaataaaatgtggaaatcaaacattaaatctgtaagagtgaatgtgaacggtgcttcaaagaagatgtatgtttgtacttcttgcctgaagtccggtaaagttgaaagagcgtaatgtaaggaaataaaaaaccatcgcggttggcggtggtttttttattttccactatctgcaaaatagattatatccccctaacaggcatcctgctgccactaatacgataaaaaagcacttgggaaatatcagggcaatgagcattcccactcctacccaaaataacaggaatccaatgagacgacacatttttgactccttttgtcctcttactttttagtatatgcagacacccgctccttcaatacacctagtctgtgggctcttcctgggaatccccttctgcctttttgtcctccgccttctgattatgggcgataatatcctcagctttcttgtctgtaaacttattgacaaagtcaggcaccatatccagaattttagtaagtccgtcctgattcttaacatttaccagttttgttgtcccattggagattacaagtacagcgctgggggatactttgccgcccatacctccggcaccgttattctttttatcatcggcaaaagcacccgctgccactccaaaggatacatcgatgagcggaagtataatggtatcgcctaccgtaattgcctcacccaccactgtcttggttgtgataaaactgtccattcccttaaaaagagaatctactgttgtctgaaaattattcccgtctgccattgttactcctccttgtgcttacatctttttatcatatattttatattagaatcacgatacagcttccatgccgcagccagcaaatgaaccccgtagattcttcccctgagatagagatctgtctccagaatctttcggtcaaaatatgggtagatacgcagtctgtctccatatttgggatagaataaactgagccccgccaacacctgaccggtcagggcagggtcatcaaacccgtaagaaagggtaccctttatcttggtcggtcccagtctccgcagaagcgtcctcagctgctcccacagcagcgttctggctcccaaaaattcttctgactttatcagctccagaaacactttcattctaccatatatttccccggttgttgagtaaatatttctcactgccgcaagaatctttcccggcagatgcaggagcttatacaggattccttttagtttcgccagcaatgcggtaaatttgttctttttaccctctttcgccggtatatccttttcttccaatgcctcctgaacgctgcgtcccccttgaagagattctttctcttcctggttaggttcctccagggtattatatgggagctccattccctcagatgacgcggttttcagctgcttcttggtatccggctgcgtctttttccgccggaaacgaattttaccaagacgcgtcaccagtccttttacccgctctgcaggaatccctaatattcttaacttgatcctgaattcaccatgttcataaaggattaaaacagacagtccatgggccagccaggtaatttttcctctccaggccactccattcccatccttctgcagctttccctggtatcgcaggggcaccagaagcagggatagcagaagcagaagaacaagtcctaccaaaatgcccaatatgattgctataacttttagtattcccaaaataatatgtagcatattctcacacctattatttttctagttctttctgtttcagatatccccgcacatctgcggtctttgtattctcatagacttcctgtaccatcaaagccacaagctgtaccgcttcgtcatatccttttgccaggcctacgatcatgggacaggtacggcgaagaggcttctgcagaagaagatttgcagaaaatatctccaggagattctccggattcttagcaagcgtcacaagatagacatcaatgactccggctccatgattaattttccatatcagtttatttttcttcttttctgcagtatcgcccacatacagattcttataccattttaacataatttctttccttactgctcttgcttcaatctttcttcaatcgcctgtaccacagattccaggactttgattcttgcataatatttgcagtttccctctacgataatccagggggcataggaggtggaagtccgaataatcatttcatttacggcttcctcatactgttcccatttctcccggtttctccagtcctcctctgtaatcttccactgctttttgggattctccatcctctctttaaagcgggcctcctgctcatccttatcaatgtgcatccagaatttcaggacaatggcccctgaatgggacagatgagcttccatgtcattgatttctttataggctctctgccactcctctttcgtacagaatccctcaattctttctaccatcacgcgcccgtaccaggttctgtcatagacagccacatggccgtttttcggtatggttttccagaaccgccacaggtagtggtgctctttttccgcaccgctgggagcagctgtgggattgacaacatatccccggggatccatcgtctctgtcagacgtttgattgccccgccctttccagcagcatcccagccttcaaaccccagcacaaccggaattctcctgcggtacagttcactgtgcagaagcgctattttatcctgtagtttcttcagcttttctttgtactcgtccttcgtataagaaaggctcagatccacactgctcagactggaggatttcaatactaaatcttcctctgtaggcttttttaactgctcctctgccgcagctttctttttctctttcccggcccggcgcaccagctctacctgttcattcagccggtcaattaccgtacggtagattttgatggtggcaaacttccgatccataccctcaacaatcgtccagggtgcataggaagtatctgtcttctccagcatctcctcgttcatctctttgtagagttcatacttcctgtttcttttcaggtctccgctgctcacccgccaggccgtctccggggaggccaaaagcttccggaatctttttttctgttcctttttgtcaatatgcagaaatatcttaaggattacggtgccgtcgtcgttcagctgcttctcaaaggtattaatctcctgatatgcatattccagctccgcctccgtagtttttttatcaaacctgtccaccaggaccttccggtaccagctcctgtcaaatatagcaattcttcctctggcaggagtctttgtccagaatcgccataaaaaggggtgcatcttctcatcctctgactccccgctgatagcgaacacctggaaccctctgggatccaggggatggatcaggcggttgatctgcacacctttgcccgccgcgccaaagccttcaaacacaataatcactggaattcccaatgttctgcattctctctgaagctctgccagcctggtttccagcctgtcgattttttcatgatactcttttttcacaatactctttgtcaaatcaatctgctccaacatggtccgctacctcctttaatttcagcaagagggactgaatgccagtccctcttccgttaaaaatatttcttatttccccatagatttgcctttttcaaatccaaatattcattgtacgctttctccaaaatctgcttttcattggaaaagcgcaacagatggtaagcttcatggaatttataatacccagaatccacaaaatattcctctctctgaggcttgctgtaatagctgttcgccgccattagataccagtgtacatccttctctaccatatcctccggcacgcagaaactgtattgactcttacccacatacttaattatggtcgctgatactcccgcctcttctcttacttcccgtatggctgtatctttaaagtcttcccctgcttcaactgttccttttggtaatacccatccctcgtatttgtgcttgtatgtcttatacaaggtcagtattttgccacgataaattaccaccccgccacagctcgttgcttcaatcatctgcaattcctcctgtacggttgtgttcaaacctattttagtataactctttttcaattctcacgcaagggaggaaataaattaataatagtattcattaaacactgccctggcgatgggagcggcggcctcactgcctgtccctgccccttcggctatcacactgactacaatatccggatcctccacattggaaaaccctacaaaccaggagtgcgtctgacgctctccgccctgatcatactctgccgatcctgtcttgcccgcagccgtgtagccctgtccgttcagctttttggcagtaccgttttccacaacatcgatcatcagctctttcagagtgtccgcctctttcacagacatcagtcttttgtaagtttccggctctgtttcacttaccttgtcttcgttgtcattctccacacgatccataagataaggagtcatcagttccccctcgttggctaccgcactggtgatcagcgccatatgcatgggagataccagagtatttccctgcccgatggaagtctgcatcagcagaggctttccggcgctggaatcaagagaaaaacggctctttctgtacgtgagatccacaggaagtttcttattaaacagcaggtcctcacttgcggatttcagggcacccgcccccagatccaaaccaatctgggcaaaggcactgttgcaggatttggcaaaggctgtggcaaagccctcctggccatgtaccgtatcgttataacagtgaatcgtatgttctcccaccgtgatactgccctgacagtcaaaagaaaagccatccagtgtcccatgttccctcaggtaagccagagaggttacaatcttgaatgtggagccgggaggatatgccccctgggtcgcccggttcaacaggctggagttgctgtcgtcactgaccagttcatcccagttgtcggccagatgattcggattaaaatctggtttgctcaccatagccaggatcttgccggtcttaggctccatcacaaccactgcgccgttataatctccaagggcatcatatgccgccctctgcagactggtatccagagtagtaattacattgtccccgatcaccttctctcccttaaaggctttctgcatctgtccaagatatccttcatgggaagtcagaagctggaaattggccagagattccagaccgcttttccccttctccgtataacccaccacgtgggcaaaaagatcatcataaggatacactcttgtctcagaaccgtcctccgctgtttccgtataagccaggctctctccgtcggcagagagaatctttccgcggatcacccggtctgcaaaggtatcctgccgtttattgtaaggactattaatgaattcctcgcttttcagagcattaaagtataccaggtagccaataagtgctacaaagatagctacaaaaaagtacgacacaatggcatattccctgtttctggccttttttgccttcttcttcttagctttttgtttttgctcttttttgatttgtctgagctcttcttctctctttctgctttccaagttcctcatcctcatcttctcttaaaatatataatccctgaacaatggccagcataataattgtgctgagcacagagcttcctccatagctgacaagaggcagggtaattcctgtcattggaataaattttgtggcgcctcctatggtaaggaacacctgaaacgcgtattctgtaccaagccccagggcaattaatttgtaaaaaggattcttaatctgaagagaaatattaacaaccatcaaaaacaggctcatacagaccagaatcaggcacatggcaaagatgccccccagctcttcacagatagcagcaaagataaagtcctgttttactaccggtatagagtcaggcgctccctggcaaagccccatcccgaaccagcttccggttcctatggcaaacagggactgcacaatctgataaccctccctgtcgtatacagagaaagggtccttccacgccaccactctctgccgcacatgattaaacaaaaagtaggcgcccacagccgccacacagccgccacccgcgccggccgccagatagagcggtttttttgttgctacatataccattgccagatatgtgataaagaataccactgcactgcccaggtctttggatgccaccagtatgaggacataggcacctgcaaccaccgtggcctttaccacctgtataaactccgtgtttttataaagcatggaagccacaaaaaacacgaaaattatcttaacaaattcagagggctgaaaagaaaagctgcccagattaatggaaagcttggccccatattccgtccgccccaataccagcacgacagccagaagcacaaatccagcaccggcatagacccaggtaagctgattcaaaaacttcatcctgcggatcattaccggtatcaccagcgctataactgtggcaatcacgacgatctgaaactgcttcaccgcacgctccagatccagtcttgccagcataatgaatcctatgctcagaagcatacacatgtggttcagtaccaaaaaagctgcctttttatagatgatgcggtacaggatctgaaccacagtaaagtagatcagctgtgctgcaaaaaaggtcaggatttctattttctgcatcttcagaaatataaccgtaaaggcaaccagatccataaaatagatcaggaacagctgcttccttaaaatatgtttcttctctctctcatttctctctttaaacacagtgaagcactgaagagtatacaaagccatgagaataataatcaaatatctggataactcaacaataacatttaccacgttttcacctactctacccctcttttaaaatgtcccttggtaaactccggtacattttggggattcttttgatggtgcaggtatacacctgcgaaaagggctatcatctctccggtttcctttgcattttctgtagtaaatgccatccgaagactttccggtcccaaattcttaacactttgactctccttcagaagtccggtggggatgctgttatatatgacgttatagcaaaaactgcagtagcattttacaggaaatctctgtccgtaccggtctgcaagctctgcccggctgtctctgccgctgcatttccctgcagttttcttcagacactgtgctgagatcatcattggatatctcccgtagatgatcatctcactgccgccgttataccgcctctgcagttctctttcattcagctccagcggcagagtctgccgctttacgccctcaagctcccaaaaagactccgcccggttgttaaagctgtacaatacatagtctaacacagctttcctctccagtccaagtttttttagcagtgcccagctttccaggttccgcaccaaaaatccgtcaatccctgcatccgccagctctctcagagtgtttttttctttttccagggtatcgcctctcacaatatagggaagagaaagataacattcctttcccccattatgaacctcgcggagcagcttttctgctccggcgaataaactatttcccgccgtcatagaacagtcaacatagatccctgctacgtctttccatttcagcgtctcagaaagctgttccctggtttccacagagatgtagaggggcagcttatgcgctcccccgccgcgcttttcctgttctctgcctgcaggcacagggggctttctcctgtaaaccttcagcagttccttttccagttcttccaatcccctgcgcctcagttcattgagactctgcataggaagaaaaagttccccttccatcataatcccggggttttcaaaagaaaagggggtggcaccagtttttctcagctgtgccttaattctttcttccgacaaaggctgctttacggcctgctgagccggttccccggatacgctgaccgaggcgtcccggcactttaaagtgaaacgggcaggttctcctgccttcagatacagacttccctctatacccaccgggctgctcttccccacatactccctggccagcttttcataaagaaccctggccttttcctctctctgacagccttttttttcggtaagcttctgatttttcacggccatcatttcttttccattgtgtacctgataataccctcggttaaatccatctctctgataaagagcagccagctctctgtaatcttccccggctactgaaaacgtctcaggactcgtcagcgccatgtccagatacttccgatagatccgggtaaccccggccgcatattccggttttttcattcggccttctatcttaagggagtatactcccccgcgcagaagctcgggaagaagctctatggtacacatatcttttgggcttaaaagatacttgtcctctttgctgttcagacgcttcccgttttcatagacatcgtaggggagacggcagggctgggcgcaccttcctctgttcccgcttctccctcccagaatgctgctgaaaagacacataccagaataggagtagcacagggcaccatggatgaagctctctatttctacgcccgcagtgtcgtgtatgacctggatttctttcagcgaaagctcccttgccgtcactactctagttactcccagatctctcagatatgcggcgcctcttgcaccggtaacagccatctgtgtgcttgcatgtatgggaagaaggggaaaattcgctctgatgaaagagagcacccccagatcctgaacaatgaccgcatccagtccccgctcatagaggggagccagatactgaaaaagactgctctccagttcagcgtccttaagcagggtattcacggtaagatacagttttttctcatgtatatgggcataatctatagcctctgccattcgtccatcctccaggttattggcgtatgccctggctccgaaattcttcccgccgatgtaaacggcatccgctcctgccagaaatgccgctttcatgccctcccaggatcctgcaggagataaaagttctgctttcatatcgttcctttctgtttttcaaacaagaaaaggagatcaccgcggcaatcccccttcctctatgataataattcatttacttctttttccagctcttccacctgaccggacagcttatgattcttatccttcagttcattcagctcattcacagcattctctagtctcacctgaagcagtgccatctcgtgcctcagatcatatacttctttatctttgccctgcagatcctcttcaaacacctcagcctgcctttttgctttaaaataatcatctgtgacattcaagcttaacagtgtatgctttgtctccacagactgccggttgtatcccggcagctgactcagctctgcaattttattattaatataggacgccaccttctgtaaatactcttcactttcataaccgctcagggtaataatctttcctccgattaacacctgcgtcgtattttttactgccatctcgggtcctcccacctattttctcatatgtctattataatcgaattctgcagaaaaacaaccctttttatcagggctgtgcgatccccagatgatgataggccagctctgtggctatccttcccctcggtgtgcgggacaaaaagccgttctgaatcaggtaaggctcatacacatcctcaagggttcccgcatcctcaccaatagacgcagccagagtatccagacccacaggtcctccctggaatttgacaatcacagtagtaagaatggtccgatccgcctggtcaagcccataccgatccacctccagcagattaagtgcaaaatttgccacctcttctgtaattcttccgtcgtatttcacctgtgcaaaatcccggacccgtttcagcagccggttggcaagacggggggttcctctggacctgcgtgccatctcttccgctcccttatcgtctatctccactccaagcacttctgccgagcggataataatcgtcttaagctcacccacgctgtagaattccagacggtgcaccaccccgaaccggtctctcaggggtgcggtgagaagtcctgccctggtagtcgcgcccaccagggtaaattggggaagatccagacggatggatcgggcagtggcaccttttccaatcatgatgtcaatggcataatcctccatggccggatagaggacttcctccacctgccggttcagtctgtgtatctcatcaatgaagagtacatccccctcctgaaggttattcaggattgccgccatctctccgggtttttcaatagccggtccggatgttactttcatatgaacccccatttcattggcaataattcctgccagggtggtctttccaagacccggcggtccataaaagagtacgtgatccaaggcatccccccgctgtctggctgcttttatgtaaaccttcagattcttttttgtcttttcctggccaatatattcgtccagtgtctgagggcggaggctgccctctacaggcaggtcttcttctgttacatctgtggttataattcttttttccatgctaccatcctacttctattatatgtgcattttcttcagagactgtttcaggatctcctccacactcatctccctggcaccttctaccagttttacagccctcagggcatctgtgccggaatatcccagagcaaccaatgcctgcactgcctcttttgaggcgtcactgctcccgggattctccccgtggtccatctgacggctgcttagcttctgttcaaaggcatcttccagattcagcttgtccttcagttccaatatcagcttctgagccgtcttttttccgattcccggtgcctttgctatggtggccgcatcatctgacagcacagcgaatctcagctcatccgctgtgattcccgacagaataccaagggcacccttcggccctattccattaactcccagcaaaagctgaaaggtattcaaatcatcctttgtcaggaaaccatacagctgcatagcatcctcacggacattcagatacgtgtatattttcaccttgtccccaggatgcagcattccatccagtgtggaacccggcataaagatattatatcctatctgactgctctccagaataattttattttcctgaatctcaatcacttcacctttaataaacgctatcatatttcctcctgcctaaagtatgccagggccgtctgccgtacgttaaagcaaaggcttcaggcgccttattagcatctggcctacaattccgatcagcagcccggttaccagacccgccaccagcaatacaggcacataataaaacaattttatattttctaccaccagaactgctaccagaatctgtccgatattatgagtcacacccccggcaatactcacacctatcacactgagtccgggaaccttcttcatccatgccatgaccattaggctcagatatcctccggccaggctgaacagaatactgaacagacttccaaatagaaagcctatgaccagaatacgtatggtagcaatcacagcggcttctttccatgtaaatacatagagcataaacacagttaccagattggcaagtcccagcttaatccccggtattccggtgaatatcggaagaagcgtctctatgtatccgaatataatggcaatcgccgccataagacccatccacgctgtcttttgtctcacctctgtcttccactcctcactgggctatagtatctgcctgctcatcctccccgttccggtagatttccaaaaccactttgttgggaagacacacaatcgtaccgccggaagcgtcaatactcttctgctttcggcagagctggtccgggcagtcagcctctgtcatccttgccgcaccatcttttatctcgcatcggttggtagaaccgattataatctcctgatcgacagatagatcgtaagtgccgtatacctctccgtctacggttatcaccagcatattccctttctgttctccaaacatcctgaatccggcccagcaggctgccgccgcaagcagaataactcctatcagaatcaaatcttttttcttcacattcaggcacctcccggaaagtatccactattgctaatgcaggatgcttgaaagagtataccataaaaaagacgtgattgcaaaaatatccgtctattgttctgtcagtttcatcccttctgttgtacgaatagttccatcctccaaaacaaaggcagcctccacgccctccaggctttctgccagttctcttcccttctcatatcccaaaagcagacagctggtgctgagaccgtctccctgtaaggagctgtcagataggatggttacctgggtaagactattttccaccggatagccggtggcaggatccagcacatgatggtaacgcttattattttcctcaaagtaacgctcataagtaccggaagaaaccactgaccggccgtctgcctccacaactgcaagaagctcgtttctgtcggcaaaaggtttctgaatgcctactttccacggcgaaccgtcactctttttccccagggtcagaacatttcctcccagattaatcaccccttttgacactccctgttctcctaaaaactccttcagacgatctgcaatatagccttttgcaagtgctcccagatcaatcatagctgcatcattttcaaaagtaagagtatctccatccagagatattccggacattcccaccttatccagagcttcctgaatctcatccggagaaggaacccggggattctctcctgtgaagtcccacagatcctccaggggagcaacggtaatatcaaactttccatctgacagtttataatattccatagctgctgtaatcagcctttgcacatcctctgacactttcacgctgccggtgcttctgtgattaatctgatacacctcgctgtcttctctggtacggctgaagatattctcatacttctgacaaagggccatgcattggtccagaatcttctccgactcttttttgccttttccagatatactgattttaattactgtatcaaaataaaaaccctgcttgctcaccagggtatcttgttctctgcaaccagtcaggctgcagacgaaaacgactgcagccataaccagacaacttattcttttcattgtataattcctaatctcgggcaagaatctttgcacttgccgcaattggtacatttttcatagtcaatatgtgctatattgtctgtaaccgtaattgcccctgccggacaatctttttcacactttttgcaggctatacagcctaccttacatgcattcataactgctttgcctttgtccttggaactgcaggccactaagtacttctgatcatagggaaccagctcaatcaggtgttttggacaggcatccacacatttcccgcaggccttgcatgcctccttatctaccacagcaatgccgtttactatatgaacagcatcaaaaggacaggcctttacacagcttccatagcccagacacccatatttgcaggctttttctccgccgcccgggatgaattgcatcatcgtacagtcttccactcctgtatactgataactttttgttgttttctcacagtcaccggcacatttcacgaaagccactctgtgaacagcttcccctgcatcctggcctaatatagcaccaatcttggcagcaacaggcgccccgcctaccgggcaggcattcacaggcgcctcccccgaagcaattgccttggccaaaccgtcacagccagggaatccgcagccgccgcagttatttccaggcagttcttctcttatggcgatttccttttcgtcaacctcaacggcaaatttcttgcctgcaattcccaggaagattccgataaaaaggcctgttccgcctactaatactgccgcaataataataccttgtatcatcgtctctcctccttatataattccagagaatccgaagaatgcgatagccataagtccggcagtcaaaagcacactcggaaatccctggaaagcctttggaatatcattgtattccatcttctcacgcagtcccgccattaatacaatggcaatggtgaatcccacagcagtggcaaacccattgatggttccttccagcacattatactctttctgtacattgatgatagcaacgccgagcaccgcacagtttgtagtaatcaaaggaagatagactcccagactgttatacagggacggaactgattttttcaggaacatttcaacgaactgtaccagtgccgcgattaccagaataaacacaatggtctgcatgtattccatgtgaatggcttcattggccagaatatatttataaataatactggtaacaaaggaggccagggtaataacaaaaactaccgctccccccatacccgcagctgtgtctatctttttcgatactccgaagaacggacacaggcccaggaactgactcaatacaacattatttacgactgccgcaccaattccaatgattaataactcttttaatgcttccacggtacctacccccctattctttctctttggcagatgaaactcttccgccgcaggatttattgccgcaggcctcacagccctcgatacagctgtgcatactgtactctttcttgggtttcccgtccattactttattgcggacagctgccagcatagcaagcacaaagaaggctccgggagccaggataaaaatagttacgggcacatagctgtcaggcataatctgcagaccaaaaatctgtccggttcctatcagttcacggaacgcccctaaaatagtgatagaaacagtaaagcccagccccattcctataccgtcaaagatagaggaaaccacgccgtttttagaggcgtatgactctgctcttcccagaataatacagtttactacaatcagggggatatagattccaagtgcgtcatacagagatggtataaagccctgaagcaaaaactgcaccatggttacaaaggatgccaccactacaatgtaagcaggcattctcaccttgtcgggaatcacattccggagaagggagatgaacaagtttgacatggtaagaatcactgtagtcgtaagtcccattcccagtccgttcatggccgctgttgtaaccgccagggtgggacacattcctaacaccaatacaaaggttgggttttctttaataataccgttatagagacgttctcccggtgaatttggtttcattcttagttaccccctttctcatattggaaagccagaagaccggcattgacacctctggttacagctttgctggttatggtggcaccgcttagcgcatcaatctcattgtcagccgccgcccctgtttttgtcacttcaaaagaatccacctgtttatccttaaactgatttttgaattcatccttcgtggcattcataccaagaccggcagtctcgctgatggtcaaaatggaaatgccattggtagtaccatcctctttcacacccagggaaaaggtgatatcaccgccgtatccctctgaggttgtaatattaaaggcataacccagactgtttccgtcggcatctactgcttccatcacttcattgactgtctgggcggcatatcctttttccgccagaaaagcctgcagctttgggtcctcttcagatatcacgggttcaaaagtatccgcttcttcaaatacagctctataagcctcaatttttgcagtttcctcctgctgggcaatgggctcagcggtaatctcgtgtactaatcccagcaaaagtcctgccactaatgtaatcagagtaagagctaatgtatcttttacaatatttttcattatttcttacctccctttccaaaagctgtaggacgggtaaacctctcaatgataggaatcagaaggttgctgaatataatcgcataagaaacaccctctgcagagccgccgaatatacggaacaggccagtcagaataccaaggatgataccatatacaatctgtccttttttcgtgatcggcgttgtcacgtagtcagtagccataaaccatgctcccagcatcagcccgccgccgcacagatgagctccgataaattccaggtcaaatccatgtccgccgaacaggataataaacaccaggaaggtaactatgtaagtgagagggatccgaaggtcaatcaccttcactgccagaaggaaaaccgcgcctatgagaatagcaatcactgaggtctcaccaatggttccctgggtattccccagaaacattctcattacatcgacactttctcctgctttcactgcagcaagaggagtagctccggatacggtatccaccagtccccaggcacctttctccacactgaaatccgtcatcagaccagtaaatgagataagcaggaaacatcttcccgcaagagccgggttcataaaattctgtcccagtcccccaaacagctgttttacaataatgatagcaaataccccgccgatgatcggcatccaccagggaacgccgaccggaaggttcagcgccagaagaaggcctgtaatcactgcactgtagtccctgaccgttaccggtttgtgcatgaaatgttcgtagatgccctcggaaagtacgcaggtagctacggatatgagaaccagcagcagtgcttttggtccaaagtttataattccaaagatcgttgccggcatcaatgctatgacaaccatcagcataatattacttgtgttcacctttgacctaacgtgaggcgaagatgatacgtgtaataattcattcatacttttctttcctcctacttaggtttcttacggttcgcaagcgcaatttttctcatagacctgatggactgggtcagaggacgttttgccgggcatatgtaactgcagcagccgcattccacacactccactccatcatatgcctcaaacatatccagctggttgtggtttgcaaaagtcgccagtctggacggcagaagcctctccggacaggcactgacgcagcgtccgcagtttatgcaggccgtctcaggctgttcagagacatcatcattggtcagacaaaggattgccccggatgtcttcacagtaggaacattcagatgaaacagcgtcatccccatcatagggccgccggcaatcacctttttgggagcttcttttaatcctcccgcttcttcaatcaggcactccattgaagtaccggtacatacggaaaagttacaggggttggcaattgcattccctgtcacggtaacaatacggtgcatcagcggctgtccaagcattaccgatttatagatagccacgaccgtatctatattgtcaaccacacagcccgcgtcggccggaagcatagaagaattaatctctctgcctgtggttgcattaatcaaacagcgctcagcaccctggggatacttggtctgcagaggtttaacctgaatcctggattcatttttcaccatttcttccatctttttgatgcagtccggcttattatcctcaatgcatataaatccctgggcattgtcaaacagtttcagcatacatttcaaaccgcccactactttttccggctcttccagtattctccggtagtcagaagtaagatacggctcacactctgcaccgttgacaagaacatattctattttatccggctctttgggggatagcttcacatgtgtggggaatccggctccacccatgcctacgactccgccctcctgaatccgcttcagaatctcttcctttgtgagagattccagtgattctgcaggatggtattcaaccgtctcatactggtcgtcgttttcaatcactatggcatttaccatagccccgcttgtagtcagacgcggctcaatggttttcacagtacctgaaaccgatgcgtgaataggtgcagacacaaatccgcctgcttccgcaattttctggcctaccaatacccgttctcctttttccaccacaggctttgccggagccccgatgtgctgtgaaagcggatacaccaactctcccttgggaagtacggcctgaattggcttttcttttgacagttcttttccgtcataaggatgaactccacccttaaaggttaaaagccccatttctttccctccttcaattagtagaatcttcttggcttttaaactacatatactcctaatttgcttaatttgttgaaagtgccttaggggcatcattaaattttgatttgtttttaatttaacaaggagaaagccaaactcctttcacaataataccacttttttataaagaatactataaaaaatactatattttttattcaatttttattcatgtttaatgttataataagtgcaatcggaaaggagtttgtattatatgtttaaaaaaaatatagtcctgacaaatttatctcatacttttcttaccggctttccactggaagtaaaatccgccgatcaggttcttttctttgatatagagaccacaggccttggatggaagcgttccgtcgtctatctgataggcgcggttcactataaaaacagccgctggaccctgactcaatggttcgctgagacagaggaagaggagaaagaaatcctcatggatttttatcttctggccgacagaaaatcctattttatccactataacggtaccagttttgatgtgccttatctgaaacaaaagtacaatttttaccagctttcccacccctttactgacaaaaagcagctggatctttatcaaaaatttatacctttaaaaaagcttttcaagctggaaaatatgcgccagaaagacctggagtctctcctgtcctacccgagaaaggataccttttccggaaaagaactcattcaaaaatataaggaatatcataaaaatcccaccccggaactgttggagctcatgctactccacaactatgatgacctgatgggaatgatcgggctcaggcctctgttctctttctttcagctcctgaacggcagctggaccatccggaaagccagcataatatccacagaaacttacgaaggtacagaagaaccggaactgctgattaccctggacctgcttgtacctctccccttccctttctccttttccaaaacagactactatctcacgggaaaagaccggcaggcacgcataaaatccccggtgaaagacggaacattaaaactgtattttcagaattaccaagattattattatctgccattggaagatactgcaatacataaaagcattggatgttatgtagacaaagaacatcggataaaggcaacacctgagctctgttatcagaagttcgagtgtacagaggagtttctggaagatccaaaaaagctcttgcggtatgtgagaggagtcttgggggttttggagatgtgaagtatgggtttaataggctgtgggaggagacagaaaagagctgccgcctctcagcaacagctcttccatctctcacttattcttctgtatcaaccgcatcctctgccggtgcttccccaactggttctaacactttcatactcaggctgatttttctctcgtctccgttgaagtctaccacttttgcggtgataatctgtcctacggacagtacatcggatggtttatccacatgttccctggaaatctgagatacgtgaagaagtgcgtctacaccgggttctaactctacgaaagcaccgaagtcggtcatacgtgcaattcttccctcaattacatttcccactgcatatttgtcagctgctgtaagccatggattctgatcttcaaatttcaggcttagagcaattttatctccgttgatgtctttgataagaaccttaatctggtctcctacagtaaagacttttttaggattctctactctgccccaggacatttcagaaatgtgcaggagtccgtccgcaccgcccagatcgataaacgcaccgaaatctgttacgtttttgatggttccctctacgacatcacccggctgaattctggcaaaaagttctttctgcatctcagctttttctgccattaacagctgctttctgtcaccgatgatacggcggcgtcttgggttaaattcactgattacaaattcgatttcctgatctgcatatttagataagtctttttcataagtatcagataccagactggctgggataaaaattcttgcctcatcaattacaacgcttaagcctccgtccaatacctgtgtcactttagcttttaagatttccttgttctcgaatgcttcttctaatctcttgttgcctttttctgctgccagtctcttataggtaagcagcacctggccctcaccgtcattgacctttaaaaccttagcttccattgtgtcaccgacatgtacaagagttgtcaagtctacattcggctcatttgtatattcacttctggaaatgattccatctgctttatagccgatgttcaggataatttcatcttcttttacgtcgatgatcgtaccctctaccacctctccatttctgatggtcttaaatgattcgtctaacatttgttcaaagctcagttctgacatgttcttgaacctcctcaataatattatttggggtggatgcccctgctgtaatacctacgcaaccaatggatcgaaaacaatcagaatccaagtcaacaagtgtctgtatatagtaagtatttttacattcctctttacatatctggtatagcttctgggtgttggaactatgctttccaccaataacaatcatagcatccacatcttttgcgatctgtctggcttccgtttgtcgctcctttgttgcctggcagatcgtattaaaaacaagtctatcatacctctttttgctaaaaatttcaactagatcttgaaaattattgtaattaaatgtcgtctgtgccacgatacacagcttttctacaggctttttcaggaattccagggcctcttctttcgtctggatcactgtcaccgggccgttgcaccagcccttgatcccttccacttccggatggctgtcatttccaaaaatcaatatatgccggccttgtcggctttcctcatctactattctgtgtatctttttaacaaaaggacaggtggcgtcaatataggaaatcccgtttttctccattctctcacacacagcacgggggacaccgtgagagcggatcaggacagttccctcccggatctgatacagctcttcttccgtctccagtatccgtacccctctgccggcaagctctctcaccacctcttcattgtgaatgatcggaccgtaggtatagacttttccgtccttttcagactctttatacgcagtttccaccgctcttttgactccaaaacaaaaccctgcggacttcgctacttttacttccatacttcctcatttctcatttttctgtttttttgcttcatatatttctagaattgcatgtattacttcaggaatattcagatctgaagtgtccaccaaaacagcatcctcagcctgtctcaggggagatatttcacgagtcatatcccggcgatccctctcattaatgtcagcctcaattgcatgaatatcgcaggcaattcccttctctgtcaattctttgtatctgcgcatagccctggtgtgagtgcttgccgtgagatagattttgacattggcatccggaagcacctgggtcccgatgtccctgccgtccataactacatttgtacttcttgccatctgctgctgcagttccaccagcttcctgcggatagccgggttggcagagcttacagaggccatattccctacctcttcacttcttagccttgcggtcacattctcatgattcagaatcacctgctgttcgccgttttcgtactgtatggtaatatccgccgtacggcaggctttttccatccccagggcatcctccggaggaataccctgctgcaggagatagtaagccattgcccggtacatagcccctgtgtccacataaacgaaggacaattgtcgggcaatttcctttgcaatggtactttttccggcccccgccggaccatcaatagcgatgttatctctcatcttgctctcctccttctattgcctgagccgccgcgtaagcggtagaccaggcgatctgcagattaaatccacctgtaacagcatccaggtccagcacttcacctataaaaaagagcctctttattagttttgactccatagtcgatggatttacctcagaaaccttgatcccgccttttgtaataatagcttcgttaaaatctctggtcccggttatggtaaacggaaaggctttcagcaattccagaagtcccgcccgctcttccctggagatctcatgtatcttcttttccggggggattttgctcagctcaatgatcacgggaagaaacttcgccggtaaaaggccgtgaattacgtttttaaattgtttattcttcccctcttcaaaatctctcaggatcctgtcatccaactgttctctggacagagccggcttcagatccacatatccctggagcggctttttttccagttttctgctcagactggcgctggcggtaagcaccaggggacctgtgacaccgaagtgtgtaaacatcatctccccgaactcctcgtacaaggtcttcttcccgtcctttatggtcagcgtaacatttttcagagaaagcccctgaagaaggggaatataggcttctttcgtctccataggcaccagcgagggaaccagctctgtcaccttgtggccagcccgtttcgcaaattcgtatccgtctcccgtagaacctgtagcctgataagagaaccctcccgtagcgattatcacacagtcaccagagattacctgcccgtttttaagcagaatccctctggcctgtcccccttctgtcacaagatccatcacctgcgttcccagatgaatcttaactccctccatcttcattctgcgctccatggcaccgattatttctgacgaatgatcggaaacaggaaagacacgatttccccgttccaccttggtcttcaccccgatagattcaaagaaatcaatggtatcccaattggtatacccataaaatgcgctgtacagaaactttggattactcatcaccgcgttcaaaagttcgctgacatcacaggcatttgtcagattgcatctgccctttcctgtgatataaagctttttgcccagtttctcatttttttcaaatacatgtacctcatgaccatgtttagcggcaaacacagaagcaaacatccccgctgccccgccgcctacaattaatactttagacattattctctcccatattaggattctttatttcaatattgttatctgccagattaatttcatcattgttatatacctggaattcatcccagatttcttccagggattccagcgtagacactacctctttctgctttttcatacaaagtgccacaaccagcgcattcactacactcagaggcgccaccagagagtccacaatggatgccatatcacttctcgctataagattacaggaggaatacaggttcataggtgagtggatactgtctgtgagcgttatcactttggcactgcgcttgttggcgaactccattgccttcagtgtccgcatagaatatcttggaaaactgataccaatgataacatccttttcatcgattcggatcatctgttcaaacagctcactggcactgtttgtctgaaggagatgtacattgtcgaaaatcaagttaagataaaagcttaaaaagcttgccagcggggcacagcttctgattcccacaatatagatccttttcgcttttaaaatagtatctacagctatctcaaaagcctcctgatccatatgctccagggtcagcttaatcttatcaatatctgactgcagcaccgtttccagtatctctgactgagggacctttccgtaagtgacctccattctctggatagagttcaatttgtttctcacaagctcttccaacgctttctgaaactcaggataccccttgtaacccagatagattgcgaaacgcacaactgtggactcacttactcccacgacttccccaagctttgcagccgtaagaaacaccgccttgtcatagttgtcattgatataagttgccagctttttctgtcccttgctgaaagacgggaacaggctgttcattctgcttaataaattctctgtctttcccatttcatacctcgatcctttttggctccctcaggagtcactgccggcattatatcatgccttcggcatgatcgccattccccgctcgctaaaagtgagcaaagctccctatggttcgctaacgctcattatatcacaaaagcgggtgaatttaaatctgccactttggattttgtttaaaatcccctgtatatccctgcgttctaaggattttctgtaaaatgcacaagaatttctacaatttcactttctgttcccacacgcatagccggtccccatacccccactcccgaggtgacaatagatgtcatatctcccacctgcagcaggccgcaggggttcttccatcccagccttaccgtaagatttccgggaaacatctgcccgtcatgggtatgaccggataaatccagatctgccccagcctctgccagttcctccagttgggaaggctgatggtccatcactataactgggatgtccttattcagattcccaagcagttcctccggagattctctgctctccctcatctttttcaccatggagggatcttttcttcctgccaggcagaaggcatcgtccaccagcagcacctcatcagagagcagcgtaatatccgcagcctccaggaattctttcattctgggatcttcctttctgacttctccggatggaaaagagaatcctgccagcagctcttcattcagatcgtgattcccccagcatgcatatactccataagtgcttttgatctctctcaaaaccgaggcgatcctttccggatgagaaatggcattgtactcattatcgaatatatcccctgtcagacagacaagatctccgtcgcaggcattgattgcctccaccatccttctcatctgctcttcgcctacactgtaccccagatgcagatccccggctactattatgcggaggtcctcccgtccccggcattctttttgtatctccacctcatatttggcagtgtgtatatacctggcgtgaaaaatgccgtatatgctcagcaatgtgataagaaaaacacagattccgcctgccgctgcaaaggtttttctgtactccaggaaatcctgagagatcctttttgtccttttcagcaaaatacgcgtcaagccggccccaaaaagcaccagcagggtatagagaaagatccccagccagtaattattcagcagctttaataacctgtgaagcacccccttatggactatgaaggaggtcagaggcgtcagcgccataaacagatatgcgcccacaaatcccctgcaaaaccatttcgactggaaatatttatgacatgctcccatccatctcatggccagccgcagtacataccaatttatcaaaaaatacagcggagccagtaaaaatgccagcaaaaccttcactcccctttcttttttatgattgtaacataaaatcagaaaaaaaggcatctgtatgaactgtgttctttacagataccttctatattatatatagttattatttaccagagatttccatctgggtcaaagggaagatactccggttcactctcgattatcagatccggatttttcttagcctcctcgtaatatgcctcagagagcataatatgttcaatatgtaagctgttaggaatcctgacgattctggcatgcttcttgtcaatctcattgcaggttcgcacacacacctgaatagcttccctgtcgctttccataataatgggaattctcacaccgcccaacactgtgcaggtaattgcattgggatacatagaagccagatccagcttctcaaaaactcttttggttgttgcgctggaataccccagtccgataccgttcccgtgggtttcagggctcagatccagcacacaaactctctgggcttttattccgccggtcgcgtagggtgtacagaaggttcccgtaatattgggatccataccgtctccactaaaattcttgccgatctgatccactaccaaaacatcacattcatccaccagtattcttggcatattggcaaatgcttcctgaagcagcggaggctctttttccgcaatctcctctgcactgactgctacaattttacatgtctcgtcaaaagcattctcaatggtggggacggcaaacagaattggtgcgtttttaataattgctcttccgaacataggaacatatttggccatatttttgaatcctgcctcgtggcagacctccgctccatgctgctttcccagtccgatggccatcatcttcataataccgctttcataaggaccccgaaatgcagtatgtggtttgatcctgcatccaaggataatcccgtctgcctctgctgcatacttatcaataaatacatccattccctcttcattgacaccaatcttcttcacttccatagacgaaagaatagggcaacccatagcttcctccgtaatgccataactttccagcacagccttctgtccctcagccgtggcacctccgtgactgcccatggccggtacgataaatggccgggcacctctgtatttcacaaaatcagcaatacattttgtggtcaatgccacattggcaattcccctggaacccgcggtaatagcaatacgcatcccaggctgtactttatcagcaaattttttctgagaaagaagctttcggataatgtccggaatctcttccggttcaatcctcggcctcggaaaaacttgttttaccttaaacattttcggcagagctatatcgctcaccaaatctgccactaactgtctgtcccgcatactgtacaactctcctaactaaaaaattattacatatcctaaggttacaagtaacagaaggattaaaaatgttacggattctatcatttctgacagtgtgtatgtcttaataccgccctttactgagacgccactcatattcgtgacaatccagaagccgctgtcatttaccgttgctccgaacagagtacctgccagacaggccatagcgatcataaccggcggcagtgccacggaagaggctacgctcgacataatcgtcatactggtaagagctgacacagtgccggatccggttacctgcttaatcagaagaccaacgaagtatgcaaggataattactacaaatacattgcttgtaaaaccgcttacaatatcagagatagcgtcactgacaccggtaattgttataatattggaaaaagctccgcccgcgccggttataaggaatacaatacctgctgaagagagagaatctgtagccgttttttctgctttctcttttcccatacattttaccccgataaggtatgccactatggctcctgcaagaagagcagtagttttgtctcccaggaagacaaaaatagacggctgagcatcccccatagcgcttccggttacagtattcagaagaattaaaataataggcacaaaaatgggaagcaatgacaggccaaaagaaggaggattcactgcagcatcttcttttgcatctatctgcacaccctctgcagactcatccaaagccggattccagaatgtcgtcttcttgtccaaaaattttgtataaataaatatcactaaaaatacaccgatcagaccaaatactgtaccaaaaccaatcataattcctgtgtcgaagccaaagatctcacctgcagccagaggggcaggtgtggggggcaccatggtgtgggcagctgccgcgccgatggtgatggcacctacaatgtgagcaattgatttgttgatctccttcatcagcgcaacgccaatgggaatcagaatcacgaaggttacatcaaaataaacaggaattgccaggataaatgccgcaagtcctatggcatagatggcctttgttttgggaaatgcctttacaatcttgtgggcaatgattttggctcccccggatgcactcacaagctccccaaggataataccgaatccgataggaaggcccatacccttcagcatgtttccaaatcctgtattaattccctctatggtatctaccatagagatgccggataacagtcccataagaatactccccagcaccagtgaaatagccgcattgagttttaccttcaggattaacaccaggataaccaccatggagataatcagggaacaaaataaccaagctgaatgtgacataaatttctcctccaatatatcttctttttatttaaaattcaataacaacctttaatttgcttccggcatgtttatcaaattcttcaaatgctctcccggcatcttcgaatctgtaggtatccgtcactatcttttccaaatttaccttaccgcttttcacaatatcaatcagctcttcaaaatcttttttcaaagcatttctggaaccgaaaatattcagttctttcttctgaattacagtaaagtcaaaatcaagattctgtttgccaactccgatgaggactacttttcctccaaaagccgctgcgtctatacaagcctggaaggtggacggaagccctaccgcctctattgctacgtcaaagccattgccctctgtcacctctcggattttttccttaaagctatcgggaccgtcattgagaatggtaccgtccaggtggaactcctccatggcatatcgcagtttttcctcagccacatcggcaatataaacctccgccccctttatcttggcagccacagcagccagaacacctatggttcccgcaccgataaccagtaccttgtcttgtctctgcacatgagctcttgaaactccatgataactgatgcagaagggttcgatcaatgctaaagttttggcaggcagccctttgccgtcataaattcgctcaacaggcattgttatgtactgggcaaacgccccctcccgctgcacgcccatggtctgattggtagtacagcagtttaccagaccccgttgacaggaataacaggtctcacagttaaaatagggattacaggtaactaccatgccaggttttaatcccctgtcgttaggtccaatctctacaatctccgcagaaaactcatggcccggagttcttgggtaagatacgtatgcaaaggttcctctgtaggaacccaagtcacttccgcagattccgccgtataaaattttcagcagcgcctccccaggctttattaccggcagaggtctctccacaacagctacatcatggggttcattaattacaatagctttcatctttctaattcctttctcaatacaactaaggatgttgaatctgatgttgtatttgttgttgtatacaacatatcacaggcctgtcatatttgtcaaccgctctccgacagtttttttctttatcctgatattatgtatatttctaacgaatatcagcgttttgatttgtatagttttacctgattcagcagtttgaactgctgattgactaatattttctggaatgatatgattattttatcaatattttacgccatacaacagaaaggaactgccgatatttatgccaaaacaaagtctgaaacaaattgcctataactctattaaagagaaaatattaaactgtgaatacatgcccaattcatttttaaacgaggatctcctgtgtgaagaattcggtgtaagccgtacccccatccgggacgctctaagccgtttggaacaggaatacctgattacaattgtcccaaaaaaggggttttttgttgccccactgtcagcaaatgaaatcaatatggtatttgaaggccgtctgctcattgagccctatgtactgttaaattattgtaaagattttcctgcagataagttagagcgtctatacgctactctggaggaaacgcaaaaaggaattgtctcaaaaagaaaagatatctatgatttagacaatgagtttcatgaaacaattatatcccagtgcatcaaccgatatttggtacagacctactataatatacacaaccaaaactgcaggctgcgaattatcagcggacgggcaaatgacaaaagacttttggataccgtggaggagcattttcagattttggaggggctccgcaataaaaattatgaaaaggccgcccaggccatgactgaccatcttacaaattcccgcgcttctgctttccaggcctttctggaaggcaacagctatctctaaaccatatcaaactgcacaaaaaagacattcgattttatgatatttttacaaatcggatgtttttttatttttgttgtatacaacaaaggatacatctgttataatacaactaaaattaataaagaatataatccggaggataaaaaaatggaattcattaacaaaacagttaaaaaagtatatgggaattacccggaaagaatcctgcagttcggggaaggtaattttctgagagcctttgtggattggatgattgacaaagcaaaccgtgatggaatctatgaaggcagcattgttctctgccagcccatcaaccaaggaatggcggatatgattaacgcacaggagggtgtgtattcactggctatgcggggaatcgaaaatggagagcctttggagagaattgaacaaatcacttctgtctcccgctgcctaaacccctacaaagactatgaggctcttatggcccttgcacgtagtgctgacctggaagtcattgtttcaaatactacagaagcagggattgcctacaaagccggagataagctcacagataccccgccttcctcctttcccgctaagatcactgcttttctctacgaaagatacaaagcgttcggaggtgatcaggagaaaggacttctcttcctccccgtggagttgattgataacaatggggacgagctaaaacgtattgtcctgcagtatgccgcagagtgggaattggaggaggcctttatccactgggtctgcacagccaatgaattcaccaatacactggtagaccgcattgtcaccggttatccaagagaccagatagactattttgaagccaagctggggtggaaagacaatattatagttaccagtgagctctttcatctgtgggtgattcagggagatgagacatgggccgaaaaacttcccattcataaaacggatgcaaatgttatatggaccagagatgtgactccttataagaaaagaaaagtacgcattctgaacggcggtcacacttccacggttctggctgcttatctggcaggccactcctttgtcctggatttcatgaaggatgaagtgttccgctccttcctccagaaagtgatttatgaggaagtgattcctaccttggtggatctgccccgggaagagctggaagcctttgcagaagctgtctcagaccgtttctccaatccttatattaaacacaaactgctggatatttcactgaattcctgctccaaattcaacgccagatgtctgccctcactccttggttatgtggaagtcaaaggacaagttccagactgcctcagcttttcactggcagcttttcttaagttttatcagggagaaatgagggaggaaggctacttcggaatcagagacgacggcactgaatatcagatcaaggatgacaaagaagtgctggaattcttccataacatctggtcttccaatgatacatctatggttgcccgtcaggccctctctcacacctctttctggagcggaagagatttgactaaagtggaaggcctggaggaaaaagttgccggttatctggcagatatggaacacaaagatattcgttctattgcagcggatctgataaaataatacaggaaaggatacatgaacatatgaaggaaacacagcatctgattcaaattgcccgggaggataatgtggcagttgcccttgcagacttgcctgcagggacagtctgccgcgcgggagataccactgttactctgacagatcccgtccccttcggccacaaagcagctcttactgacatcccggaaggacaaaacattattaagtacgggcaccccatcgggcatgccctgtatacgatccgaaagggccagcatattcatacccagaacttaaagacgaacctggacggaattctggactatacctatacaccgaatcaaacatgcctgaacagcttttctgccccaaaggaaaatgccttcttccagggatacctgcggccggacggaaaggccggcatccgcaatgaaatctggatcattccaaccgtgggctgtgtgaataccactgcgtcccttctggccaaagaggcaaataaggcctttggacagcggacagatggtatctttgcctatacccataacatgggctgcagccagcttaccgaagattttgaacgaactcagcagattctcaagggcctgatccaacaccccaacgccggaggagtcctggtcctgagcctggggtgtgaaaacaataatctggatgtatttaaacctgtgctgggcgatctggatcccaacagagtaaagttcctggtaacccaggaggcagaggatgaatacgaggaggggatgcagcttctgaaagaactgacggagtacgtctcttccataaaaagagaaaaagtatccgcagagaagttagtcgttggattcaagtgcgggggatctgacgcattttcaggcatcacagccaacgccctctgcggccgtatcacagacaagctagtccgctgcgggggaagcgcagtgcttaccgaggtgcctgaaatgttcggcgctgagaccctgctgatggagcgggcagtatcggaggaggtttttcaggatgaagtaaagctaatcaacgatttcaaacaatacttcaccaaatacaagcaaaccatctacgaaaatccctcccccggaaataaaaagggcggtatctcttccctggaggaaaagtcattgggctgcacccaaaaaggcggccaggcaccggtggtaggtgtgctggactacggccagtcggtagaaacacacggtctgaacctcctcaccggcccaggcaacgatcaagtttcctgcaccaatctggttgccagcggcgcccaaatggtactctttaccaccggcagaggaaaccccttcggcacccctgtaccaacagttaaaatctcctccaacactcccctctatctgcgaaaaaagcactggatcgactacaacgccggtcagcttttagaagggaaaacctttgaggaagtcacagaggatttcttctcatatctcctgaaggtagcatccggggaagtgaaaacacagaatgagatctatgggtataaagagatctctgtgtttcgggatggggttattctgtaaaataatagttttgtgtatatgaagctcgaggttatatagtcggcaaggggagggttgcagacggacagtaaagggaggagggcgtgagtggtacacttttcatcttgtttcgcactattggtggctcaatgttttggctaaacaactaaacccgtttcaattattaattatactttttcacgctgtccttactttatacactttaaaatccttccgcacatttctttgcatctgcacttgacagaatgtttcatcacacggaaaatcccccacatgcctgattcaacatcccaggcaaaacttcctgaacggtacagatagtcccccggacaggcagccccgtcctttagttccatatcaaaccggtttccgacactgattcccccctgaagcggaatctccctggacaaggcatcctttggctgttctctccataaatgtccatggatagtcagtgaaacattcctgggcttatctgctggcatcatggtgcggaaaatcacgcggtcaccggaataagctttccacacaggcgttgccgggtctccatgaaccctgctgctgaacactttccatacccgtgcatccctcaagagacgatttgcaaaccgttcggaccggtagttgtaacctttttctcctgtatcttccgggtcgaccggatcctcactgactgcagctgcggtctgaatcagatttccatgtgcatccaaaagccggattccattctgaataaacaacacatattcccggaagttttccattcccggtgccgttatcaccgcctgttccgcaaagggattcttctttttcgtaaagttttcataccattctgcccctgcaggctctacaatcaccgccccgaacaatccgtgatacctgtgattccgcatatctgcgaatgactgcagaatacaggctccgtattcccggtctgccttccagaaatagcgcttgcactcgccgggtccaacggtctgctctttgggattatagcccacgttgattcccgaatcgcagacagggtcatattgcagaaactgtggattcagagaaaccctgttcgacggcttatgctttagatcaagcggtactttcggataatcaaaataaggcaccggacggtccgagtcccacacattatgcaaaataacctccagccagtctcccacatttgcacgcagtattaaaggctttggagtatattttccggccaatacaagatccacatcctccaaagggacaaaaatcagtccgtccgggtcatggtctccataactgttatagaccagcgctgtctgcaccgccgccacttcatagcgtctaaccacatcatccttgcccggacagggcgggagaggaagaatcatatcttttcctttgcatagcggtttcaggcattcctgatatttatcataagcacggatgattccccagaggccaagccatacatcatcggtcccgccaaaataatacagataatcccctgcctgatacggttctttgatgtttaaattgaaagcctctgaaactccgattgtctgtgatgctgccagtggggatctgtcatctgccacttcttttctccatgacatcccggtgacactaaatacatgctgttcttcatgcgccccatctatcaggcgaatcatcagctcatctcccggatacgtttccaaaacaggagttgccgggtctccatgcacgaaggagcttaaaatataggctgggtcaccatcccttttcagtctctccctcattggttccgcacggtaattgatgcccatcactcccgggtcatcatgagagccaggaacctccggggcattgagtggttttccgtctttatcaaacagaaacgcgaaatcatgaacaaaaagagcaaactcccggaatgatgagccgtctctccttcggattaccgcctgcgttccatagcgcagctcttccccgttccgtatattgtggaaggttgcacctgcctcctctaccaccaatgcaccaaacacaccatgcagctgatgtgcgttggcaaacaaatggtcatggaaaaatacggtccgtaattcttcgtctgcaaagaatcgttccactaatgtttcgtactttcttgcccccgcaatattattccagccgtttgccgccccatcggaagtaatcgtatcaaatttcaccaaatgcacatggtggcctacaatatccgttctggtcttgagctgaaatgcatttgcctccagaaattcaggcagcaggttcgttgtacgcagttcaatacagtctcctgcattggcacgtattaccaacggttctacctgaattttctgcgcttccaccttacagatataggattccagaccgccgtggcgctccagctcttcttttaaaacgaaaaaacgtccttctgggtcgtgccagccatactgattgtatgtgagcttcgcctgtacaagcgcgatttcaaatacttttacattctcacacggtgtatctatcgcaagacactttttataatcactgcactctgcgcaatccgcacattcattatctgcatcacattctatacaaacagcacgtttcttatcatcttcgcactctttataattgtcacattcccctgtcgtatagcagagacaggtatccgcatacaatgcgcccggagctgcattttccacaaaattcgcctcttccagtagtgtcggacataccacaacatttccctctgcatccaatactccgcagggtggctggcgcggcggcatccccacctctccacagataaaattagggtatcccggatggcactcatcttttttcagcggccgttcccggtcttttaatggctgaagcgcaggaacaggagtcccatctggcagtttcccgcttccatcttccaaccggtcatgaattctccataaagtccacatgccttcatggaaatgcggatacaaatgacaatgaaaaatcacatcgccaattacccggtttaggcttcctgccccatgcaaaatgtccagcgtatagcattcctggggacttatggtaatcgagtcaataatcgtagaaaccggattttccggttccagcctccattgatgattatggaggtggaacacgtgtgtttccttgattcctccatggatcagacggattttcgccgggtctcccacatatgccctgagaatcggaggtgccggttccccgtatacccaggagctcatagagatttcctctcccgaatctgccgggtcatgggtcagcggcatccggtttctcataggttccgagcggtagctgattgccgtcgtggacgcaggcagccctgtcctgtggtctaccgggggatttccatccttatccaaaatctccagttcgtcatgaaaaaacaccgagtattcccgaaaagccggctttcccggctggtaaatgtctgccatcaatccactttctatttcttcccccgtctgtggatgaaaccactttgcgccaggcggctccacaatcactgcaccaaagagtccatgcatattcgtggcctcttcactgcttctggcatctgccatatcatggaacagaaaaacaccttccacattagcataccatgtgtatacaatttcacggtttgtcgtgctgtcctgattgaaccctgtactggtaccatcggaactcgccacatcatatgccagcccctgtacatggattgacaacctgcggttcaatggattacgaaaacgtactttcaccgtatcgccaagattcacgcgaagcaccagtggctgtacttcctcgcagggctgcggcggcatctgatggaatctgcggacagcttcctcctgtattctctgcgaatccttttccagtacatacagaagtccatcgggatcgtaatccccatatcgattatatacaatcggaatctgtattgcttttattgtaaaaaagcgggtcctgttttgacagggatattggcacagttccattacctattgcctcccttcgttttcaggattctaagataatgatttgcttcccgaagcacatggtccgccagcagaggaagtataacggagcgtatcccacagcctgtaattccttccgtacctgccgccttaaaatcgcggtactgctttgttgtttccaaggtctttctcgtcagttcatccatcgtccgacaatcctgtttactcgcttcttccaacaggcggcagtagtccccggcgaaattatctgccgttttcataagttcacactccgtcgggtcaagcagcccccgaataaacaacgcatgttccatcatgatctggttccagaacagttctgcattttttaaattctttgacggcatacatcctttctcttccagttccgttagaatctgatggtacaattttgcctcccggaggatatgctcaatcagaagcggataattcactgtgtacaggttacaagccgtgacctcttgcaatattttctctttaaacgcaatcaatccattcagcagatacagtacattctgattcagtcggcgtacctgctgtatcattcttctgtcctgacatattccacagcctgcatgcagtttcttttctgcctgcgtaatccgaatatcaattggaatctttgtcagtcgtcttgtctgctgctctgccatttctgtaaattctgtgaacacttcccctgaacatagcacctcttctcctaccattccatcggcaagccagactgcctgctccagcgctttttcaaactgtgcacgaaaccagtctgccttgtttctatatcccgtttcccctgccgggaatgcggtcaaaagaaacagtgcatgttctctcatgattctggtgaaaaacaaatgtgtttccagtgatgttgttacatattttttcattttcctgcataccttattattttatagaatttctatataatatatgcaatcatccaaactttgccgtaactaataatcctataatcgcccattatcattctgacagaatctctatcattttctgatccctttctccccgaaaaaacttgtcttataggagataaggtgtatttccccttccttattctttctgtcagttcgtaatggtgttccttcagccatggcagagccgcttcaatggtcatcacatctacacgcggcgctcccttgtttgccttcactttcttatatgctctgttcaggttgtccttgttcagaatcctgcttaaaatgtccggttctgcactgtccccttacttccatatccggttgaatgagcggtacgctctcacatacccttcgcgtttagcgctatttctttgtgagcagctttctctgttttctgtacccatctgcacattcctcctttcccaattgtactaaaggctcctattgattcagcctttcactgaaccctgggtgcctcacgtttctttctctccatccatctgccgcatttactgcacatgattccttgtagctattgggcttcgtcttgtcaaagtaggttccccacacctgccgtcctgaagcaccttaagccgaagtctaaaatttaagccaaaaagaggaccaacacctggtcctcttttctctccctatcctaaaccggataagccttattctctgtatctgccaccgtaggatccacctttgtcttctgcgcttctctgtatttaaagaagtcaacagcaacctgtgggaacagtgcgtaagttaaaacgtcttcatcctgctctgaccactgtgccatctctccccttaaggtatctaactcatcaggaatcagatctgctggacggcaggtaatcggctctttatctccgatgcatttcttttgaacctcaggattaaagggctttactgttgccccgtattctccggaaagtacagcctttgtttccttggtaaccatcttgtagcgctcacccataagtacattgaatactgcctgtgtacctacaatctgagaagacggcgttaccagaggaggctcacctaaatcttttcttacccttggtacttcttccagaacatcataatatttgtcttccgcatgctgctcttttaactgtgatgtcaggttggagagcataccgcccggtacctggtataataaggttttaatattcactcccatgttcttaggattcagaaggccgctttccagagcctcgtcacggatcggacggaagtagtctgcgatctctgccagcagattctgatcaaatcctgtatcatatggtgttcctttaaatgtctcaaccataacctctgtggcaggctgggaggttccaagtgcaaatggagacatggccgtatcaattacatcaacaccggcctccactgcctttaaataggtcatagatgccacaccggatgtataatgggtgtgaagctgaatcggaagactcacattttcttttaaggctgtgattaactcagtcgctttataaggaagaagcaggccagccatatccttgatacagatagaggttgcgcccatctcttcgattttcttggcaatgtcaatccagtactccagggtataggcatctcccagtgtgtaggagagcgcaacctgagcatcggctttctctttcactgcagctttgacagctgtctgcaggttgcgcagatcatttaagcagtcaaagatacggatgatatcaattccattggaaactgatttctgaacgaaatactccactacatcgtcggcgtagggacggtatcccagaatattctgtccccggaatagcatctgtaattttgtgtttttaaatccatcccggaacttacgaagtctgtcccatggatcttcttttaagaaacgcagggatgcatcaaaggttgcacctccccagcactctacggaatggtaacctacctggtccattttatctacgattggaagcatctgctctgttgtcattcttgtggcaatcagagactgatgggcatcacgcagaatagtctcagtaattttgattggtttctttgcgatttctgacatattcttacctccattcttattttaactattaaactccaaagattgccatgaatgtaccggctgctactgcagtaccgataacaccggcaacgtttggtcccatggcatgcatcagcaggaagtttgtaggatctgcctcagctcctactttctgagacacacgggctgccataggaacggcagatacaccagcagaaccaatcaacggattaatctttccgccggacaatttgcacatcagtttgccaagaagcacaccccctgcagtacccaaagcgaatgcaaccagacctaagactacgattttaagtgtatccaggttcaagaatgcctcagcgcttgtagatgcacctacggatgtaccaagtaagataactacgatgtacataagcgcattagatgcggtctctgttaactgctttacaacacctgattctctgaacaggttacccagcatcagcatacctaccaaaggagctgtggtggggagaatcagacaaacaacgattgtgataataatagggaacaggattttttccagttttgttaccggacgaagctgttccatcttgatttttctttccttctcagtggtgagaagcttcatgatcggcggctgaataatcggtaccagtgacatataggaataagctgccacggcaatggggcccatcaaagtagtctgtcccagtttaccagccaggaagatagatgtcggaccatccgcccctccgataatggaaatagccgcagcagcctttccattgaatcccaagaaaatcgctaagaaatatgccccgtagatacccagctgcgctgcggcacccagaaggaagcttttagggttggcaatcaggggaccaaaatcggtcatggcgccaacacccataaaaatcagagacggcagtatactccactcgtcaagcagatagaaatagtgaagaagtccgcctacaccgtttgatgcatcttcggctctcagcataatatccggataaatgttaaccagcagcataccaaatgcaatcggaaccagcagcaaaggttcaaaaccttttcttattgccagaaataagaatacacaggcaactgcgatcatcagatagtttccccatgttaaattaaagaaagcagtctgatgaagcaggttagacagtgtttctgttacataagacatttttttacctcccattgtaagttttcaggcaggcagatacctgccgcagggaatttacacagaatgcaaattctagttcattgatgctaagatgtcaccagactcaatggcgtcgcctacagatacatcaatacttgcaatggttccgtcctgaggtgctacaaccggaatctccattttcatggcttccagaataataatcgcatcgccggccttcacagcctgtcctgcagaagcttctactttaaatactttacccggcacggaagcctttacttcaacagcacctgctgtccctgccgctgcctttttaggagctgccgccggtgctgccttaggagcagctttcggcgctgccgctggtgctgccggtgcgctgccggtaccttcttctacggttacatcatatgcagttccattcactgtaattgtatagtttttcatgatttttcctcctattgattaagctctctgccaatttcttttatttgattttctgatagatcttactacaaaactgtcagtggaagtattctcagatgctgcgatcgccgctgcaattactgctaccagctctccgtcatccacaagctcttcttcctgcaccagggcaggagctgctgcaggtgctgtttccgctgcaggtgctgttttctggggagcagcctcactctttttaaacttatccgcaatggctggtatgaatttaaaaagataaatcagaaagctcaggaatatcagcatcaggaatacgatgccgactcccatcagcgtattcataccggctctctgcaatttggttcccatagtgtactgtatatcaatacccatagaggtagcagcatactttttatcaaatgtaatcgtaaaaagtgcttcttccttttcaaatttagtaggtatggtaaccgtaatcatttctttatctgtctccagagcggcatctcccatactcacgtaggcacccagttcatctctgctcccctgccatgcttccatagcagatacagagaacgcatcttcggattccagataagactgtatagtctcatcatccatgaccacaattgcttcaacggcggactgggcagactgaatcagctgactttgaatgtcttcgctcacctcaagcccagtgctctcatccttcttcccaccgcaggcggtaagggcagcgaagagaacccccatcaaaacaatgctaaatatttttttccatgtctgcttcatatgattcacctcgcctaaaccgtgccatgtttcttgcttggtcggtcttctctctttgtgaataacatttcaaaagctccaatcacatattttcttgtgtcttctgcttcaataattgtgtccacatatcctctcttcgcagctgcctgagcgctggactgaagagttgcatattctgctgctttttcattaatcgttgctgcatctgcacctgcatacatgatctttgctgccagttttgcatccatcataccgatctctgccgtaggccatgcaaataccatatctgctccggtagatttgctgttcatggtcagatatgcacttccgtaggctgcgccaatcactacattcaccttcggaacggttgcatttgtatatgcatatgttaatgccgcagctgcttttgccatattcgcttcggcacattttgtcgctttatatccttttgcgttggtaagtgttaacacagggatatcaaaagcatcacagaaatctacaaattctgcagcctttttacatcctcttgcagaaagaacattgtcgaattcttccgtcttattgccttctgcatcatatacttcggttctgttggcaacacatccaaccgttgcgccgttcaggcggataaatccagttaccatgtctttcgcatagctggatttcacttcaaaaaatacattattatctgcaatctgggaaagagcaatagaagtatcacccacacaattagcaagttctgtacaaaccctgtttaagtcatctgtacattctgtgtaagacatgtcatcctcgttgttggctggaagcatacttaccaaagctctcatctgtgcaataatttcttcttcacttcccacaccgtctaccagtccggtctcttcgctctggaactttgcgctggatgtatcgcatttagaaatttcgttcccgtcaattgcattgggagagtttacaaataacctgccttttttctcttccataaatgtaaaatctgtcatcgcagatgcaatggcaagaccgcctccgcaagttccgaagatgcctgtaacctgaggtatcacacctgatgccagagcctgcttggtgtagatttcgccgaatccgtttaatgcgtctgtagcctcttccagacgaaaacctgcgcaatctaccagtccgattacaggtgctcctgttttcattgccagattatagaggtttgtgatttttttagcatgcatttcaccgatggttccgtttaatacagaagcatcctggctgtaaacatagactaaattgccgtcgatcacaccataacctgtaatgacaccatcagacggtgtttccttttcagataagttgaaatccgtatttctagctgtaatctgcccgccgatttcaacaaaactgttctcgtcaagtaaagaattaattctttgacttgctaagctttgtgctgtactactcattcttcagccctccattttttattattgaccaaaattttaccaatgtaaaaccaatttctgccgagtataattgtaccttgtttcacgacttttttcaacatgtattttgtgaaaattttaatgaaaaaagggcaaaaaaagccggggtttctggctttttttctaaagaaccccggctattttaaacgatatttattagttatttcctgaatcatattaaaaaacttctctgaagcctcttttgccactcccggtttccggtaatccatcctgtgttccatgagcattccgtgaaaaagataacaattcatctcactcaatatcctggccgcttccggcgtaatctcccctgcccgggctgccctccggagcatcatataatccctctgcttcacgtcattgctgaaaaacacactgtccgacagaccgtcaaattctttcacatcttccggaaacatccggtagtactcaaagatagtatcccccagattttctttatacttgccgaaaaataacatttcatagatgggaatcgacgcaaaggcataccctgcaaagcagtcccacagcgttaaatactgctccagcggattcatattttcgttcagtgtgtttttaaaacagcggatataatcctgcagaaaacgcacggatgcatacataatcaactgatccatatctgcaaaatgcttatacaaagtggtactgctcagccccaatccgcttgttattttccggatgctcaggccctgcagaccttcctgctgcataatctcataagtcctctgaatcagctctttttttgtatttttttctcccattttttcacccatatctgtcctttacagctggaaatcacgtatctttttagaagaatgtttctgtataaattaactatagagaataaaataatttctgtcaagattaagttatttcgcctctgcggacaatggtttcaggagattcgcagttacagcagggattccccggatactgccgccttcatcgttttcacatactctgccaccggtgccacagcatgttctccatatttggcgacgattttaacaatggcagatcccacaatagcgccgtctgaaatacgggccattttcgccgcttgttccggcgtggagataccgaatccgacggcacagggaacctgtgtttcctccctgatcatagcggtcatctcccccacatctgtcttaatctcacttctgacgccggtaacacccagggaggaaacacagtaaataaagcctttcgcttcctttgcaatcatccggattctctcattagacgtgggggccacaagagagatcagatccactccaaaggcttcgcattcccctgcaatctcattcttttcctcaaagggaaggtccggtacaatcagaccgtcaatcccgcattccacgcacctctttagaaagcgttcctttccataagtatagataggattgatataggttaaaaataccataggaaccttaaccttttccctggcccttttcaccatatcaaagagtctgtctgtggtacatcctgctgccagagctctctcattagcttcctggatcacaattccttctgcgatgggatcggaaaagggaataccgatctcaatcagatccgccccggcctcctccatggcagccaaaagcctttctgtcacgtccaaattgggatctccccctgtcacaaagggaataaatgcttttttattttcaaatgctttatatatattactcatagatctccactcctctgtatcttgcaatcgcagctacatccttgtctccccgtccggatatattgatcacgatgattttatctttgtccatggttggtgccagttttctggcataggctacagcatgtgcactttctaccgccggaataattccttcggtccttgacaagtattcaaaggcagccactgcctcttcgtcggttatcggtacatacctggcccttccggtgctggccagatgggcgtgctccggcccgatgccagggtaatccaggcctgcggaaatagaataaaccggagcaatctgaccgtattcgtcctggcagaacagggatttcattccatggaaaatcccttcgcttcccttagcaatcgtagccgcatgctttgaagtatccactcccagaccggcagcctcgcacccaattagctgcacctctttgtgaggaataaattcataaaacgcacccatagcgttgcttcctccgccaacacaggcaatgactgcatccggcagcctcccttccctccctgcaatctgctctttgatttctttcccaatgactttctgaaaatcccttactatcatggggaatggatgggggcccattacagaaccgagaacgtagagggtatcgtccatccttcgggtccactctctcatggtttcattcacggcatccttcagggtcatggttccgctggtcactgcgtgaaccttagcccccaaaagctccatccggtacacattcaacgcctgtcggtccgtgtcctcttttcccataaacacttcacattccatgcccatgagggcagctgccgtggctgtggccacaccgtgctgtccggcgcctgtctctgcaataactcttgtctttcccatctttttagccaggagcacctgtcctaagacattattgattttatgggatccggtatgattcaggtcctctcttttcagataaatcttggcgcccccaagatcctttgtcattttctctgcatagtacagacgggaaggcctccccgcgtaatttctgtataaatcatccagctcagccacaaagtccggatcctctttatatgtgttataagcctcctccagctcatggactgcattcattaatgtctcagggatatactgacctccgtattccccgtatcttccttcactcatatgctcttaccctttctataaatctctttactttttcaaaatctttgtatccatcggtttccactgcactgcttacatctacggcatagggggaagccgccgctatggcctctcctgcattgctctcctttagtcctccggccagaaaaaacggtttgcctataggggggatcagatgccagtcaaatgtttttccgcttcccccgtacattcctttcgtataggtgtccaaaaggagatagtcacagggaagctcagccccctttcgtatctgttgtctgtctctgactctcaatgccttgattaccggaacctcaaccttttctttcagcctctgtatatattctgcactctcatctccgtggagctgcaccatatctataatatggctctcacagagagtctctatcacttccggatattcatttacaaacacccccactgcctgaatctcaggatccaaagcctttttcagttccagagctccatcaattcccagctgcctgggacttttggcaaacacgaaccccacatagtcaggcctgcatgtgtttgccattagaatatcttcttttctgcgcattccgcatatcttaattttcgtcattctctcacatcccctggagtgttctgagcatctgcttcttatctctgcttctcattaaagtttctcctattagtacaccgttcacctttgcgctgcgaagtgcctgaatatcctcaggggtttttatgccgctctcagccacaaaaattttgtcggcaggcgccatagaacgcagacgtatactattattgatatctacggtaaaatcctttaagtttctgttatttacaccgataattctggcgttcgccttcagtgcggattccatttccttctcgtcgtgaacctccaccagcgcagagagtccaaggatatcacacacggatatatactccgcaatagtctctgtatccaggagggcacagatgagaagcaccatggaagcccccaaaacctttgcctcataaatctgataagggtccactatgaaatcctttctgagcacaggaatgttaacgctctctgcgatctccttcagatacttgtcacttcccagaaaatatttcggctctgtaaggcaggagattacagctgcgcctgccctctcgtattcccccgcgatctcaagataaggaaatttctctgcaatgactccctttgagggggatgcttttttcacctcacagataaagtgcatgccttcttcccccaatatctgttctgcaggaaaccctgtatctctcccctttttcagggcctcttcccggatggcagggtacgggagcctttcttttgctttttgtaccctctggacagcataggctgcaatctcttccagtatcatcccttcacctctttcgtggcagcaacaaattcgtctaattttgccagggctttcttttgatctatcaggtctgcggccatggcaattccctccttaaggctaatatcatcaatccccagatacaggctcataccggcattcataaggattacatctctctttggcccccgctcaatcccctccagaatgtccctggtaatccgtgcattctcttttggactgccgcctaccagctgagaaagttcacaccgtttcagaccaaattgttccggtgcgatattgtaggaggttatttccccgaaccgaatctcatacaccgtagtctcgccggtcagagtaatctcatccaaaccgtcatccccgcatacaaccactcctctggtcactcccagattcgacagcacctgtgccaggggttctgccagttttctgtcatacacccccagcagctgcatagttgccgccgccgggtttgagaggggaccaagaatattaaatactgtccgtgcccccagctctttcctcaccggcgctgcatatttcatagatgaatgataagtctgcgcgaacataaaacacatattcgtctgtttcagaaccctttcattttgctccggggacaatgccacctcagcgccgagatgctccaggacgtctgctgccccgcttttgctggatacgctgcggttgccgtgtttggccacaggaacgcctccggctgcgacaacaaaggcagaggttgttgatatattgaaggttccggcctcatcacctcctgtccccacaatatctatgacttctctctctggttttagtttaattcccttttcacgcatcacagttgcaaatgctgttatttcgtctatggtctccccctgcatgcgcagtgcggttaaaaatccccccatctgggcctgagtggctgtaccgtccatcatctcttccataacaccctttgcctcttcatatgttaagtctgaaccatttaatactttatgaattgcctctttgatcatgttatcgtcctcctgtttgtcattgttttattctaaatttaagaaattctctattattttccgcccgtcgggagtcagtatggactccggatgaaactgtactccatacaccagatacttctggtgctgtactgccataatctctccattttctgacttaccgattactctcaaacagtccggcatagtgtcggggacagccaccagagagtgatatctggctaccgctgtctctctatccaggccccggaacaaatagctttcggtatctattgtaattctgctctgtttgccgtgcatcagttcttttgcatggccgatagcagctccataggcttcgcatattccctgatggcccagacacacccccagaatgggaatctttccctgcagcttttttactatctcttcacatacccccgcatctgcggggtaccctggtccaggagaaagtataatatgggacgggtgcagggcttcaatctcttccactgtcatagcatcattgcggatgaccttaatatgagggcagatactccctgccatctgtaccagattataagaaaaactatcatagttatctatcagcaataccattattccagcacctcccctgcatgtattattgcgttcatcactgccgccgctttattggcagattcctcatactctttttccggaacactgtcggctacaatgccgccgcctgcctgcacgtatacttttccatccttttttactgccatccgtatggcgatgcaggtatccagattgcctgtaaaatccagatatcccaatgctcctccgtaaatacctctgggttcgctctccagctcttcaattatctggcaggccctgatcttgggagctccggagagtgttcctgcaggcagtactgcctctatggcgcttaacccgtcgcattccctgcgtatctccccttctacctgagaacatatgtgcatgatttttgaatacttgtgaatcatcttatactgtgtcacttctactgtgtcaaacttagagattctgcctaagtcatttcttcccaggtccaccagcatattatgctctgccagttccttctcatctcccagaagctcttcctccaaatttctgtcctcttcttccgtctctcctctggggcgggaaccggccacagggaatgtcgtcagtctcccattttccagtctgactaaagtctccggagaggaactcataatctcttcgccgtcaatatgaaaataaaccatataaggagaaggattggtggttctgagcacccggtagggaagtatcaggctgccctcataggggcttgtgaactgtctggagatcactgcctgaaagatatccccgtccacaatatgctccttggtcttctccacaatccggcagtattcctctttgcttacattgcaggaaaactctatcttttcttttggggctgcctgttctcccaccgccccattgcggattaagctaatgatattttctatatccgccattgccttcccatagttttccatcaccttgtctgttttcatattcacaacaatgcagattttctgtttcaggtggtcgtaggcgatcaccttatcaaaaagcatcatatcgtaatcattaaaactgccctttttaatattcaggaccggctctgcataccccatcatggaatacgcgaagtatcctacaaatccccctgcaaaaggaggcatcccggacagcctgggagctctgtgggatttcatcacctcacggagcacttccagcggatgctctgtgggaatcacctctttctccccgccctgctcctttacaacctcaccgtttttacaggagacacgcatcacgggattatatcccaaaaaggagtatctgccccatttttcaccgccctctatgctctccagcaaaaaaaagcgttcgctgatatttgccagttttctaagtagtgtgattggcgtaattacatctgcatagatttccctgcacacaggaattacctggtagtcttttgccaattctagtatttcttcacagcttggctgcatcataatgtgttcctcctttttgataagatatccaaagatcaaaaaagcctctgtcccttcagaaacgaagggacagaggcaaactctgcggtaccacccaaattgccgatcacgaatcggccactctatcatgcactgacatacatgccttgttgataacggataaggctcccgtcggtgtctactctcttcccgggaagatttcaagccgccctcgcaagtccattcaataaaaactgttattgccgctatcccaccatcagcagctctctggaaataaatattcttatctactactcttgctcattggtttgttctttgaattagttctttaatgtaatacagtatatgtaatttttctgggtttgtcaaccgtttttttaataatgaaaatttgcaaacggtatcctgctaaccgggatgccgtttggtgcttaccagaaaagatatttggtaaattcagaattttcctggaaaaccagacaggaatcctgaagtctgtcttctgcgattgcaaagccaaggtgtattgtctttgtctcagaaggcgcaaagttcatataataaaaatgttttcgttcctgcagatagctggactgatcgaaatagaagggcatctgatccggctgtataccatacatatcctgagataaaatccgataagtatcactatcctctctgccatactgatacagtctgggatttaggccgatatcctcaatcggttcttctgcagtatttgtcacctccatggttacctgaagatatttcatattcacagtgcccagatccttggttttcgtctcattatcctcccagaccacctctgtcctctgatagggaagaagggttccgtcttcgctgatatactcctcagccgcctggggatcactgaaaaatcgggaatccatggagtctgcgggcactttgtcgagaacctctgcatttttcaccgtgtatttcaggctctcgtctgcagcaattgagccgtcactcgtctcctttaagttaacgtatggaagagtatctcccacacgtatgatgtcatcctgtccgaattttatctgttcctccagtacttcctgatcttcctgtacggggttctgaaaagcctgatatgttttgtcctcatcctggacaacctcataacggacattttcggctactttaatcacttcctccagagggatttcatcggaagccataatctcaatgacgttccccgtctcttcatagaaaagataaattatatggctgtattcggacccttttctagttaacacagttgccttgacaccgttaatcgtagtatcctctgcctcgcttgcccctgccacagtcatatcactctgccagtttgccgacgcaatggttatgcccgttcccccgtactccccattcagagaatatttattttcatcccactctttatacccctggggcaagtaatctgcataaatttttatgggtggaacatatgtattgtctgtccgctccagatgaatattagcctctcccttgtccttatccacatccacactggcgtgatagatggaaatggccgcatatacgctcagcgatacactcagtaccagcaccgcacaggcgcaggctgctgctgttttgctccatcttctcctggttttccccccggctgctgccaaaaggttctctttctttttctgatattcctgcgagaattcatgatcttcttcctgctgaagctgttctctcagatactcttcccccagattcttcaataattgctccatattgggtttctgactcatttatttcatctcccatccgtttttctattaatttcctggcacgctccattctcttggatactacatcctctgatacattgagtattcgtgccgtttcccggttgctgaatccaaagtagcagcgaaatttaaccacttccagatagattggctgcagctcatagagaaccctgcttagaaaatccctgtccacagcctgctgcccgatatctatggatattaccttctcctgggaaagtgcatcctccacggtacacatctcgctgtctctgtgattttttctgtattgatcaatagccgttgttctcagtatccgcataaccagccttttggtttttacactgtcagcttctgcgatcctgggcagatatttcatcagttttacaaatgcatcctgtacggcgtcctctgcctgctgcacctggtgcagaacagaatacgctatcttatacatatcctgctcatagagccggtatatgtcttccaggatctctctctggtctgccttatttttaagacgcagactcattgattccacctcccctttttctttttcgagcgctcttatctaatataacgaatgggacttctgattactgacaaaagagcagagaaaatttctttctctgctccatttcctataaggttacttttctgaaattctttttgcctctttttactacaattccttcccctctcagggattctccgggaaccaggtgcttaatatccgttatcttctctccatccacagagacacctccctgttccaccgcacgtctgccttcagagcgggatggcactaaaccggatttctgaagaagtgtgataatgtcgatacttccgtccgtaagatcctcctcttccagctgtgaagtaggcatattcgccgcatttccctttgaaaacagcgcccttgcgccttcctgtgctttctgggcctcctcttcaccgtgaacaagattggtaagttcataggccagaatttcctttgcctggttcagctggctgccttcccatttgtccatctcgtcaatctgctctatcggaaggaaagtcagcatacgcaggcatttcagcacatctgcatcccccacgtttctccagtactggtagaagtcaaagggtgatgttttcttcggatccagccaaacagcacctgactgggttttacccatttttttgccctctgagttcaaaagcagagttatggtcatggcatacgcatcttttcccagctttcttctgataagctctgttcctcccagcatgttgctccactgatcgtccccgccaaactgcatgttgcagccgtatttctggaacagtgcataaaagtcatagctctgcatgatcatgtaattaaactccagaaagctcagtcccttttccatacgctgcttgtagcactcagccgtcagcatccggttcacactgaaatgagggcctacctccctgagaagttcgatataatttagatccatcagccagtccgcattgttgaccatcagggccttgccctcagaaaaatcaataaagcggctcatctgctctttaaaacagtcacagttgtgctggatggtctcaactgtcatcatctggcgcatatccgaccgtccggaagggtcgccaatcatgccggttcctcccccaagcagggcaataggtttatttccggccatctgcaggcgcttcatcaggcataatgccataaaatggcctacatgaaggctgtctgccgtggggtcaaacccaatataaaaggttgcctttccgttattgaccaattccttaatctcttcttcatctgttacctgtgcaatgaggcctcttgcctgcagttcttcataaactgtcatctctgttctccctttctcttttaaactttttattccatcttgcaagttctataaggataagaaagcaaaaaaactcccgtccttcccgttacgaaaggacgggagagattcccgtgttaccaccttacttcacagccagttcacactgactgccttatcaagtacagcattcgttgcgatacttctgcacggtaacgtgtgcaattccgtcgcagcctaccagcacagtgcgtgccttcagtgcgaagctccaagatgtattcagaatcagtttcttcctgcacctctcatccgccggttgctttctgtaagttcccctgattcctacttgttcttttctctgcttttctttatcttatactccggggacctccttttcgtgggtcctcttcgttatgcgacatatgaaattaaattcagtatacaaacagcattcccgtttgtcaagtatcaaatacaacagaaactgaggttccttcctctaaactgctctttatcttaatttttcccctgtgattttctgcaattgtcctggcaatggccagtcccagtccgtatcctcctgcttttctggctctggacttgtcggagcggtaaaaccgctcaaataaatgttccagctcttccttcgggattacgtccccggtgttttttacctccagatgaatcttttcctgttttttttccagatttacagttatctttcctttgggctttacgtacttgcaggcattgtccagaaggatggcaatcagctgcttgatctgcccctcatccccgaggagggagatttccggggaaatattttcttccagaagtacatccctttcaaaagccaggggttcaaagggcaggatgcagctccacaatacattgctcagatcaaaggcagcgtataccacaggtgtctgcatggcatcggatcttgcaagaaaaaggagattgtccaggagttccttcatacgggtggcctctgtctgtgtgttttccagccatcttttttcttctctgattgtgctgtcctgatggctggaaagaatgctgagattggccagaatcacggtaagaggcgttttaagttcatgggacgcatctgcgataaactgccgctgctgctcccaggctttctccaccggattcagcgcccagcgggacagaaaaaggctgatcacaaaaaaggcaagaaaccctcctgcaaataccagagcactggctgtaaggagatttttcattccattcatttctctgctggcatccacaaaagcgatgatattcccctgttccgtcttttttatctggtatctcagctggtagctgcggagcagtcccttttcttctccatggttgagcactgtttctgcaatctctattgcatcctcctgatcaatgtcaattccgctgtcatcaatattcaatatattcccttccccatccatggttatcacaaacagaggtcccatatttaaagggagtttttccctccttggccccatctccattcttggcagcaggcttcccctgccttcactcagagcatgattcagagctatatcactgtccatctggtattttttgtagttagtaaaacacagtacaccaaatacaatcaaaaggaccagagtaaccagagacatatttatgagaataaactttttccgaagctttctaatcatgcttccccggcctccagcctgtatcccaccttacggattgttcctatggctgcgcgggagcctaaaaagttcagtttctttctcagaaacgatatataggcttccacattattatcctccacatctgcctccacaccccacacttttgtgattaaagtatccttcgatacgataattctgggatttgacattagtatcttcaggatttcgaattctttatatcctaaatgtatattttttcctccgcaccagaggtcattggtagacagaaccagcgtaaggtcctgaaactcgagttcttccataatcacctctcccatgcgcctggtcagtgcccgtattctggccaaaagttcttcttttacaaatggcttggtcatataatcgtcagcccctttatcaagtcccataactttatcctgtacctcatccctggcagtaagcatcaggactggaacctctattttttctgcccgaagctgctttacaatctggaatccgtccatcccgggaagcatcacatccagcaccaccacgtcatactggccgctcaaggcatagccaagcccctccctcccgtcatataccacatctgccatatatttttcttcccgcatgatctcgcccaaagcatctgccagtctgatctcatcttctacaattaatacatgcaatttttgttccccgctttccaggttattccccattctgtctcgatagtacaagaataaagtatctggctgaaaatagtctgaaagtcttacgtccactctacagcctgtactgtttattctatacctgccactggcgctgaaggctttctatctcctgtttcagttcctcttccctctcccggaataaaagctttttgctgcaggcaaagtattccggacagccgtgccggcggataaagtccattccttcacggttttttgacagcccggtgacaaacaatatcatctcctggtcgtccccgaaggtatcctgcataaagtcaaaggcttttttcagagccttttgggtccggatgattacttgctctctgcgttccgtctcaagggtaaacaatgcacgtagtttttccattgccaggtctccccgggttagtctttccttttttaaaacctgcagatatccttccaggatacgcagcacttttgcctccagttcctcttctttaactgatattagttccgcctgtacctttacctccagactatgtctctgctgttccaggaagtcttccagagtttctgttcggctgttatcagaaagccagtccctgacagatagcaatcgctgatgtagacgctttaccaaggcttctgcttctgtatatctgccaaagtactcacccagctgttccaaaagaaggccggcaattgtcagcctctcgtcaaaggcagcctcctgtcccatagctactttccgggagtatgcatctgcagccagtctttcctccagcatctctgtaatctgataatctccctgatatttctcatacagctgataataggaggcaaaatctctggcaatgtcttctttctgcagatactgcaccattaattcttctgttacaggtatattcagttcttcgtagctctttatcatttctgacaaatcctcccagcctcttgcagttacaaagaatttgccctctgcagtattttctacaagataaaagttgtctttcttgatattcagatacgacagaatacctccgtgaatacgattttcgcaggcatactccatccaggcgctgcagtctgcctctacaaggatcttttttacccggtccagggtgacaacatcaaactcccggactgacttattgtactcagggggattccctgccgccacaatcacccagccttggggaaccttatgacttccaaaggttttattctgcagaaactgaagcatcgttggagccagagtctctgagacacagttaatctcatcaataaaaaggattccttcctgatgtccggtgcgctcaatgcactcatatacagaggcgataatctcgctcatggtatattcggtgacctgaaaggatgtgccctgataaactctctcctcaattctcggaagtcctatagcgctctgacgggtgtggtgggtaatagtatatgccaccagtcccacaccgcattcctctgcaatctgctccataatagctgtctttccgattcccggaggccctattaatagtaccggcctctgccggctgcggggaaacaggtactcttccctctcgttctttcgggtatatgcccgtatggtattctttatctccgtctttgcctctttaatgttcatgggatcctccctctaaaatcaacttcacagcccagccgggcagcatctgctgcttcaggctttcctcccgcaaaaatacaaacgctgcctcatagtccggcttcaccctggggtagatgccgtcgccgtcagtaaaatatatcagggcttttaaatttctgatttctttctgctctttcagctgctccacatagttaaaaacagggcggaaatcagtgcctccccggccctggatccggatatgctcccgatagtttttccaggtctcctggctggtcacaacggccacatcctgtatgtagcagtcacactgtataatatatactttcatttttttaaaaaagttttctttttcgttcaagattgcatatgtttcttccaggaatctctgtaccatttccctggaacaggaaccagaggtgtcaatggcaatgacaagttcctccagcttatgcccctctttgtattccagaggctcaatcaggggcatatttccataatgctccatcccgtaatgataaaatatatagtcaaagctctctgtatccaattcgacttcttctctcggtactgcaaaccgttttagaaaacgacggtagtcatattttcctttatgcagtctctccacgcagtcagaccggtcccctttccggcttcctgctcttttactcatcccctgcacattctggctggtataggctgtgattttctcccatttatgcttgattgcttccagtctgcagggatctgccttttgtatccagaaatgatggtcatctctcataaacgctgtcctcagcgtctccgccggccaggggaacgcctctttctgaagcatatggtacaggttctcagcggaagccggagttccctgaagccaggccatgcagtccctggcttccggtgccaggggatatatagctcctgccatccttgctgccgttatctctaccgccatgtcacaggccagattccacagcaggatttccctgtccggcttctctgctatgtgcagaaagaggcagtgaagtaccatatgaagatatgccgccttcacccgggcgggggactccctgtagcaattcatcacatattccggagaatagtaaacccaatccccgtccgtaccccagctccccgtatccttacccgcctgaaactgcagccctcccaatgccgcgggatacagaggaaacctggtaaaaagctcatttctgcagttttcccatattttcaggcacagagactcctttgcctgtctaagcgaccgcttcctgtctgcctccatttatcctcaccttttttcgttttatagtacatcttttgcccgttttcattaaagaggaaattcctcatcctcaaaggaagaattctgctccttccaatgaagcagaaaagtcattgcccctatactccccctgtctgcagccatggaaataaaagaatctatcaattctgtctgcagccatcccagctttgccgtacgagccaaaagctccatattttcttcctctatcagccgctccatcatagggcgaattctgcttttcagatacctttcataacggtttctcagctcttcatctaaagcctcccctgaaaaatagcgtttcagggcaatatccagcttaattcttccctgtccagactccagaaatttcaaatcccggggatccatgcgtccgcctccctttcagtttctattcttaagccattataacaaaaaatgcgtaaaatttctaattctggtaaaaatatagagcataaatatggaaaggatgaattgtcatgtcaattgattttaaaaacagtgaaacaaaagagaacctcatgcgtgcctttgcgggagagagccaggccagaaaccgctatacctttgctgcctcccaggcaaaaaaagagaagcttcctgtcattgaggccgtgttcacctttaccgccaatcaggaaaaagagcatgcagaaatattttataaccatttaaaggaactggcaggagaaactataaccgtggatggaacctatccggttgacattcacagcagtgtagaaaaacttcttcgtgccgcacagcataatgaatatgaagaacacgatgatgtatataaaaactttggtgataaagcaaaagaagaaggatttcccaaagtggctgcctccttccacatgattgcagagatagaaaaattccatggagatcgttttggtaagtttgccgagtggatggagcagaacaaactctttgtatccgatgtggagacaggctggatgtgcctcaactgcgggtacatctatcacggaaccgaagtgccgaaggaatgccctgtctgtcatcacgaaaaagggtactttattcgtctggagctggcacctttctaaacctacctaaaatggggacgtgtactttctagaaagtacacgtccccattttagactcagggtgtcccaaaatagaactgccctgtccctttttatttatagtttgcaaaacattctctcaccttcggcactacgtagtggctgcctccccggtctttcacatcttccaccatcattcctatgagcagacaggagttctcatccccatcccgaattcccataaagtaacccagctctgtaccgctggtatcttccttggaggcctttatctccgctgtaccggtcttgcctgctatggtttttccctcgatcatggcttcatgcccggttccatccggatgatcaaccacctgaaccatatcattccacactgtttccgctgcctctttggtaaatacgttttctttccagtaggctgttttttcttcttccccctttgtcagataaggagttatcatgcttccgtcattggcaaaggcagaatacataaccgccaggtgaaggggatttactagaatttttccttgtccatatccgctgtcagccagttctgtctcgctttgtatctttccgtcttccccatacgttgagggtttgtattccattgtaaatggaacggtttcattgaatcccacggaatcaagacccttctggaaattctctgttcccatatccagggctgcctgggcaaaataaatattgtcggagtatacaagggcattttccaggtttttaggactatagtctgtcagtgtggtaacgtaataattcccccagctgctgtccttctgccactgcagcccctcatacaccgcctctgtgccggctgtcagcgatccctgggtcaggcccagagccgccacaatgggtttgaatgcagacccaggcgcccaggtagaccgacagcggttgtacaaaggttttgacgcgtcattattcaattcctcccaagctctgctggtgtagcccatcacaaaatcattgggattataagccggcgtgctcaccagcgccaatacttcccctgttttcgggttcatggcaactccccagcctttatcttcagccagctgacggtacatctgcgactgaagaatggaatctattgtcagggtaatgtcctttccatcctcccctttttgttccacaattacaaatttctcatttccatcactgtccacaacagacactttacaccctgtggtcccatgaagctgtttttcatagaccttctcaatgccccctttcccaatctggctggtggcggtataaccttcgccggcatgttcttccagttcctccgctgtgatattctgtgtatagcccacaacctgagcggccgactgccctaagggataataccgcacggctgtatctgatatcttgacgcccggaattgtgagaagctgtgccttcagcgcctcctctgtcttagccacagtgcggataggtacaaataaatcatctttcacccagtttgcgcttaaagctgtttcgatcttctctgtgctcacatccagatactctgcgatctgagcaattgctccctccctgtcttccggtagtttcccggggacaattccaaccgaggatgcggttccctcacctgccagcattaccccgtttctgtcgtatatatttccacgtttgggataacttgtctctgcttttatctcttctccttctttcagatgaggatgcagatcctgtaccgaccagttcagcatatacatcttgtctttatttttagaaaaaatagcactgttctcaaaggatagctcccccgccagcgtactcatagtgagctgataggagagtgtccgggcgctttctctcttggaattggatttgtcatcctcctcaatggaaatcttgatttgatttgcctccatgctgccgtaaaaattttgattcttttctataaatgcttcctctgaaattgtactctgactatcttctgagagcatatggtacattttttcatattctttgtcattgacgaactgaaaatactgtttcagtctcttttccggcgtctcaattttactgttttgatacaggaagaaccctatgacccctcccaaaaccagaaccgctgcgattatgataattgctgccgcctgcttcggcgaaacctttttattctgttccattctattcccctcctggatggtgtctgactgtcattgttactataaaaatgtgttactgttcgttccgttctcagtaacacgcttcgcgggacagtcgtgtatgaacagtaactaacatgtattgtaatattatctttcgtccgtgtcaatttgtctttccctttcctttgtgttatcatattgctattataagtattgaccaaaggagggattcattatcatgacacgagaggaagcatggaatcttctgaccgaatataaccaggaagagttccatttggaacacgcacagatagtagaaaatgtaatgaggtattttgccagggagttaggatatgcccaggaagaggagttttggggcattgtgggccttcttcacgatctggattttgagcagtttccccaggagcactgtaccaaatctcaggaaattatggcagaacgaaagatagatcccgcgattatccgtgccaccgcaagccatggatatggaataaccgtagatataaagcctgagcatgaaatggaaaaaatattatttgccacggatgaacttacaggtctcattggagctgttgtaaggatgcgtccttcacacagtgtacaggatttggaagtaaagtctgtaaaaaagaaattcaaaaccccaaaatttgcagccggctgctccagagaaataattcagcagggtgccgacatgctgggatggaccctggatgagctgatggaaaggaccattcaggctctccggacattccaggagtagctgcccggccataaaaaggagactctcccttgtggggaaagcctccttttgttgtgatttatttttcataataacgaatcaaagcctgcgttcccagatcctccattcccttttgagacagctgctcatacatattcaaaacctcttccagaacaggcatggaaacttccctgtccctcccctcttctgctgcgatcttcatatccttaatataatgtttcataaaaaatccaggttggaaatctccacttaaaatcttgggtgctatgttgctcatctgccagcttcccgctgccccctggctgatgctgtccagcatcacctgcagatcaagacctgccgcttttccgtatgcaagggcctcacacacgcctgccaatgcccctcctagggcaatctggtttgccatcttggtatgctgtccgctgcctgccgttccctcatagtgaatggtctttcccatggcctgaaacagctcctcacacgcctcaaaatcttctctggttcctccggccatgatggacagtgtcccatttgcagcgccaacatcccctccggataccggagcatctaaagctttaaggcctcgtttgaccgcctccatattgatccgcacggatagtttggggctggtaatagtcatgtcaataagatatgcccctttggcagcattggcaaggatacccccctctgagaaatacacttcttctacatctttgggatatcccaccatagtaatcactgcctcctgctccctgacgcactccgcaatcgtatccctccactgggccccctcccggatcaagtctgctgctttctcctttgttctggtgtaaacagtaagctcatagccggccttcatcaaattacgagccatccctttgcccataacaccgattcctataaaacctatctttttcatctgtctctcctcttttcactgtcatttctggtggtattttctttctactatagcacattgaaatgggacagacaagcttgcggcgcttctaaaagcccaacaggaatttctcccccaccttcccaaagcaccactggaaatctaattctcccactgacttagatgccacgataggatactcctgtatcacctcgccgttcagcttatactgtacacttcctactgtctgatgctctttcacaggtgcagtcagggatttggggatatcatagataatgtccacctgctcatcctttcgaagaagcatagtgaggctttcgtctccctccgtatctacagaaaccggcacataagccttttgggacattttgcccgtagaagatattccatcttttacaaatacatcctgcatctctttatcctggtccataacattttgataggagtaattatccagtccgtaagtcatcagcttcttcgtgtcactccatttataccccttattattcggccaaccacaggccagaagagctacaataaacgtcttgccgtcccggttcagtgctcctacataacagtaccccgcttttgctgtaaatccggttttcccggacaaggcaccgtccatcatagagaggaacgcattatgattgttgcagctatatgaactttttccctccagatctgagaagctgtaagatgccgttctggtcacctccagaaactcctcctttttaggagactctgtaatgcagtatttcataatccgcgccaaatccgccgctgttgtggaatgtaccttctgcacactggttacctggccctctgcatccgtctcctccagtgttttagaggcatccaggccgttgggtgtgataaaataggtatccctgcatccaagctcctgggctttttggttcatcaaatccgcaaatccctccacggatccgccgatatgctctgcaataaggacagctgcgtcattgtgagattccagcatcagggaatacagaagatcccctaatcggaactgctggccctcccggacccccagatgtactttcggctgggaagccgcataggcggaagccgttaccgtgtcctccatatttccctgttccagagccacaatacaggtcatgatcttggttgtgctggccattggtttggcctcatagccgttcttttcaaagagaacccgcccggaatctccgtccatcagcacagcggaaaccgcatatagtcctgatggctcctccaccgtatcttctgtgccttccgcatagacaggaacagcaccaaacactcctgccgtcaatgtaaatattgtaatccatacaaaaaaaagtctcttcatagactcctcactcaaagcaatatataaaactatatgcagacaaagttaaaaaaatgagtgtgtccccagccttaagcctggccgggagcaccgctcatcttttcatgttctctctttaattcttcatacagctcaagagaattccattctcgattcgtatccgtcagcactgccttcagatttaccttttccagcctttcccttcgaaatgcacgcagcatatcgttcagctgcccgtcggtgaaaccttttaataccatcatttcctctgaaaaccccggcccttcgtaggttccagcacatttctccatacccggaatctttgccagggcgcccacaggctggagatactctggaggggtcactgttataattttagctcccaggcggacacagataaattttattttctgttttcgcccgggctctgtaatattgtatagcaatacggtacatcctgggttcattccatcacctcacccttctattttagttgtcttacgaaatgcaatgagtccaaccacaaacatcagcgccagcatgaatacccctgttttagagcttccactcagctgtgtggatattcccataagcatcgtccccataaaggctgcccccttgccaaaaatatcataaaacccaaaatattcgctggatttttcctttggaattatcttcgcaaaataagaacgggacagtgcctgaatggccccctgaaataccgccacgcacaccgcaagaaaccagaattcccatgccttatccagctgcagggcaaacagcgcaatcccaagataccccagaatagagatcatgatcaggttctcgcttttaaaccgcttggaaaatcttgcaaacaatatggaacaggggaacgccacaacctgcgttagaagcaaggctaaaagcagatgcgtatcgctgattcccacgtcttttccataggaggttgcaaggtcgataatggtatatactccatcaatataaaagaaaaatgcaatgagaaaaaataaaacctttttatttttgccaatatgtgtcaatacattccccagcctgacgaaactatcccgcacaggggtatctgacacctcgatccaatgcgtctgctgataattcttcagaaggggaagtgttacaaaaaaccaccaggcacctgtaatggcaaatgcgatcatagtggctgtcacccctgagattccaattgcatctgctccaagtatcagtaggagtgaagcgacaaagggaatgcagctgccgatatatccccaggcatacccatgggatgagacaacgtccatacgctcgtctgtagtaacgtcgatcagcatagaatcgtaaaatataagactcatattatagcttgcctttgcgattacaagaacgattaagaaagccagccactgtttgggaatcatcaggctcaaacagccaataacgccaagtataaaaaacgccgcaaacaaaggctttttataattacgggtatccgccagtgtgccgaagaccggtcccatcactgcaaccagtacggtacaggctgacagcgcatagcttaaatatgcggtagaatccgccagtgagattccagcctgagaagcaagatttttaaaataaatgggaatgattgtggtgcacagcattacaaaggcggaatttccaacatcgtacagaatccactgtttttccaacctgctcatcttatccatgcttttgtccttttctttctccatattctattcaaagttgcggtaaaaacgttcactgagttcttcccttcccatcatgcactcatagaggttccccagggcttctgcggcctcgtcaactgccttctgatacatgacaaccagctcttcattggacgcttcacactgagggttcttatgctttctcataacctggccctccattgaatcatagcaccccagaacttttaaaagaagcagcagcagtttcctcttacattctgttttgcatactaaaatacctgtatagaacttcatccctttcagggaatcccaaacctcctccgggcggatggatggaaacagtgaactgataatttcgtttcccttccgggtagggcagatagacacagccgggtgataggtaaatggatttttatgctcctgctccataaacatccggtccagttccgtctcaatttccgcatgtgacacccctgtgattctctggtattcccatatataggggtggcaggcactgtccagaatataatgacaggcaaatcccaggagataggacatcattttatctgagggccgttcctgaacttttttgatccctctctgaaaaaacgatgctgctattttttcatgcacttccatggcagtcctattaactttatttttgccgaaaggtttatagtaaaaaaagatgtccggtccgtgcaggccgatgagatacaaactcttagattttcttataacatctttcaggttgtctggaagctttttgaatacttcctttccaaataaatcatgagtatatgttgttggcataaattttctccttattatatatccagcttcagctgtacttcctcctcagcctctgccttaaaatcttccagctgtaccggatccagaatcggcagatcgtctagaccctgaacgccaaaatttctcagaaattcttctgtggtcccgaacaaaatggggcgtcccggcgcgtccagtcttcccagctccttgaccaggcggtattctaccagcttattcaccgcgtgatcgcttttcacccctctgattttttcaatttcctgctttgttaccggctgtttgtaagcgatgatcgacagggtttccagcataacatccgtaaggacggcttttttaggctgcagcgccagccgcaccagatagtcataatattcctgtttcgtgcacatctgaaaggaattttccagctcaataattttaattccgtgaccctcttcctcataacgaagcatcatattccggataatttttctggtggtatctgtatcatgttctatggcattggcaatttttgttatctcaactgcctctcccgcagcaaaaagcagggcttcaatggcaccctctatatgctttatctccatctgccttcctcttttcttacaatgtttctatatagatatcatcaaaaagccgctcctggctaatccatatcttcccggtcttcatcagctccagaacagccagaaaggtaaccacaatctgcgtcttgcttgcctgcttctgcagaagattgcggaagctgaactttttatgggtattggcgtattcctccacataattcattttatcggggagactgacctcttccctctcgatctttccgaacttgcttcggatgggatccagcttgtcctcctgacggcgtataatagatttaaatattttattcagctgagccaatgtgattccctccagaagctgagaaggatctgcaggctctctgtattccagcacctcttccgggatcgtaggctttttatatattgaacgtgcagcttcagccattctgtctttcagttcataagacatatatttatacatcttatattccagcagctgctgtaccagttcatccctgggatcctcttcctccccctcttcatttatctcccggggaaggagcattctgcattttattgagatcagagtagccgccatgaccataaattcgctcatgacattcaagtcctcttcctgcatcctgcggatgtactccagatattgctctgtaatttccacaatgggaatatcataaatgttaactttgttcttttcaatcaggtgaagcaaaagatccagcggaccctcaaacacctgcagtttgacgggaattcccatagtaaccctcatttcctgcatcagcagagtgcctttaccgcacccgccttcatttctagacattcgaagctaattttacaacatttacaaggaaaagtccatactacacttccggctgcagtctaattacaagcatttctctgggattaaagattctgaggggaatggtatgctcccccattcctgcactgactactgcatattttccctcttttgtaaatagtccatggcagtatttggggaataaggtcatatacgggctgattaatccgttggtaaacggaagccgcaccattcccccatggtagtgtccggacaatgcaaggtcagccccccaatccaggtaagcgtctgtaaacctgggattatgtgcaagaagaatattataggcactctcctctggtttgcccagcagcagattcagttcccgctgggacaggccatgtctcctctttctctcataatacttcattgggagttcaagtccgtaaatattgacagacgtttttttgtctttcagagtgatatgttgattttccaggagaatcactccggccttttgcagctctctttcatatctctgatactgatgctcaaaccgttccggattaaccttcattctgtactcatgattacccagactatagtagacagggcagcatcccacagcctgtctcacaaaggataaggcaggcaaaacggatacccccggcttacctataagcaaatctcctccgatcagaataccatccgggttctcctggtatatttttttcaccaggacctcattgtcctccccgaaacaaacattgtgcagatcgcttatcataagaaacttccatggttctctgatttttggggaactgaattcatattccgctgttataaactttttcactgctaatttctattccttttccatcaattttactcttaactatacactacttttccctccggcgcaatttcggatactttttccaacacaaaagcagaatatgcaaagagagttcctctttatatattctgctttttttcaaaatttatgacgattctgctaccagccaatcctgaacagattttttgacataatcaaaataattcgatttttccacatctgttttaaatacaatgtcaacagatcctatcttttctccgtccagataatactccgcggttcccgctttatctccctttttcaccggagccgtcacttcttttttcagcttgattttcttttctatcttatcaaatgactgccctttggtatccaggtactgaaatggcccctggtattgacattgggcttccccggctatggatttctttactgttacaggctttaactcatccttattctcatccgtgtacatattacagcttccaaagccaagattcagcatagctgctgcgtccttaaaacgaactttatagtccggagctgtcatcactacactgattaacgtaattccatcccgttttgccacagccgacacacagtattttgctatacttgtgcttcctgttttcaggcctacacacccgtcataaccccttaccagtttattagtattcgtaaggcaaaattcctttgtcccctgggcagtcacatgtgttatatcttccatccagatagaggaatagtccaaaattttcggatacttggtaattaactccctggacatcaaagccacatcatttgccgttgtataatgattggaagattctgtgagaccgcagcaatcttcaaaatttgtattttccattcctaatccttttgctctttcgttcatcctctttacaaattcactctcacttcctgcaatgtgttctgccatagcaacactggcgtcatttcccgaggctactacgatacactttatcatagtttccaccgtctgtttttccccctcctccaagaacacctgggaaccgcccattgactttgcatgggcactggtaacaacctcatcctccatatgtaaggttcccttctccaattcgtcaaatatgaggatcagtgtcataatcttggtaatactggcggggctaacctgggtatccttatccttctcataaattatcgtccctgtacttgcctccattaaaaccgcatggggcgctgtaatcagctccccgctttccgtctcagcagtttcagctaatacaagggcaggagagatactgaaaaaaatagtaagaattgaaagaagaactgctaacttccgggccatgattatctcctagatatgctttctactattagtttaagcgggggggaggggaaatattacaaataatagttttgtgtaatagttttgtgtatgtgaagttcggggttatgcagtcggcgagcaaggcgttgcagacggacggatatagaagggagcaccggggagacagggccaggccaggggccggggtataggggcaggtcagctcgaggctccgttcccctcagctaagtcctaccagctgctaagctcgtcaggagagccttcctcgctaatcagctggtggcctggatcttcggctcactccgcttgacctccctgacctgcccctataccccggcccctggcctggccctgtctccccggtgctcccttctatatcctggcagagactcacttcacattcacggaaaacgggtggggaaggtcgagagttgtacacttttcctctggtttcacactattgataactcgatattttggataaatagccaaccccctggaacttctccatacccaggtgagaggaattctgcggcggtgggctggctggttcgggcgggagggaggcttaagttccggggacgattccgcaggagtgagtagagagtcttaggcaaaaccgggattcacgctggagattttttcggcagtcaaggccgaaaaaaagtgagcatgggcagagaatgcacatcaagcattctttgcacatacgaacggtgctccggcggggattccggttttgtcttagactctcttcgcgacggaggtgtccccggaacttaagccttcctcccgcccgaaccagccagcccgctgccgcgggattcctctcaccgtccccccgccacctcacactttccgacttgaatcactttaagctgaagtccaagccctacactcctaaattccaattatttgacatatcccccatttagtgttatcctgattttaaacaaaatattacagtcaggggagcctgtgtgcaggctgagaggaagtactcaacttcgaccctttaacctgatatggataatgccagcgtagggagatgaaatcaataatccggagagacgttttggcgtctctctttttgctttctctaaaaacagacaggaaaagaggtgatgcatctgcaatatcagggattgtaaaaaaaggagggaaacattgatagaaaagaaaacatccattttcggcagcagtcttatatggtttggagctgccatttccattgcagagattatgacaggtacgcttctggcgcccctggggatgaaaaaagggatagctgctatattgctggggcatctcatcgggtgtgtgctgttttattttgcaggcctcataggaggtgagacaggaaaaagctcgatggaaaccgccaggctgtcgtttggacagaagggttctcttctgttctcggttcttaatgtcattcagctggccggatggaccgcaattatgattatcggcggtgcacgggccgccggaagtatctctgcttcactaacaggagcaaacatggaatggctctggtccctgattatcggaggtctgatcctggtctggatcctgatcggcgtcaccggtcttgggaaaataaatacggtagtaatgtctgctttatttcttctcaccattatcatgagtgttattgtttttaaaggaaagagtcccagtttggcggaaggcagtatcagctttggagctgctgtagagctgtccgtggccatgcctctatcctggctccctgtcatctctgattatacaaggacagcacaaaaaccgcgctcggctaccctcgcaagcacagtgacgtattttattgccagcagctggatgtatcttattggaatgggcgccgccgtctacaccgcagaatctgacattgcggcaatctttctgaaggcagggctgggcgccgcaggcttgatcatttttatagcttctactgtaaccaccacatttctggatacctactcagcaggtgtcagtgctgcaagcatcagcagtaaatttaatgccaaaaaggttgctgtatttgtatgcgtaataggaacagccttggcaattctggctcctattgaacaatttgagaattttctgtatctgatcggatctgtatttgcacctatgatcgctgttatgattgccgactattttctgctgaagcaggatttttcaagggaatccttcaatatcaggaatctgatcctatggggtgtgggatttatcatttaccgtatatttatgagaattgacactccggtaggcaacacacttccggtaatgttcattattattttgttatctgtcattacataccaatttgtcaggaggacacaaacatgctaggagaaatgcttgaaaatgttagaaaaaaatcacctttgattcaaaatatcaccaattatgtaaccgcgaatgactgtgcaaatattactctggcgtgcggcgcttcccctacaatgtctgacggggaagaagaggcagtggagatggccacactctgtgacgggctgaatattaatatgggaaccctgcacccccgttcaatcaaagcaatgctgcttgccggaaaacagtctaatgtatgcggccatcccgtagttttggaccctgtgggggccggagcctcttcctatcgcatggagactgcagcagctctgttaagagagatacaatttgctgccattcggggaaatatttcagagataaagacccttgccaacggaaaaggaagttctaaaggagtggatgctgacgccgcagacgcaatcacagaagataccctaccggccatgatagcctttgcaaaggaatactccggaattaccggagctgtcattgcagtctcaggggccatagacatcgtagcagacagccaaaaagcctatgtcatccgaaatgggcattctgtaatggctcaaattacaggatgcggctgtatgctcagctctctcactgccgcttatcttgccgccaaccccggacatctcctggaagctgccgccgctgcttccattgctatgggcatatgcggagaaatggctcatgataagatgatcgcacagcaggccgggaactcgtcctgccgcaattatctgatcgacgcagtctatcatttaaccggagctcagctggagaaaggagctaattatgaactgtactaaggaatccatgcttttatatgccattactgacagagcctgggtaggtaaacagactttgatggaacaggtgaaagactctctggagggcggcatcacctttcttcagcttcgggagaaggacttggatgaagcccgttttctcgaagaggcgaacgagatgaaagcgctagcctcaaaataccgcgtcccctttgtcattaatgacaacgttgatattgcccttgcctgcggagcagatggggtacatgtggggcagagtgatatggcagcctctaaagccagagaaaaactgggtccggataaaattgtcggcgtgtctgcacagactgtggagcaagctttggctgcggaaaagatgggagctgattatctgggagtgggggccgtatttgccacctctacaaaggatgcggatgtgatttcccgcgatacattgaaagaaatttgcaaggcagtctctattccggttgtagcaatcggaggtattaatcacaataacattctggagctgacaggaagcggcattgacggtgtctccattatctccggcatctacgggcagccggatattaaagaagcctgcaggaagcttttgaaactatccagggaaatggtggagctatgagggccggaataaagggggctatatttgacgcagacggaacactgctggattctatgtatctttgggataatctggggaatgcctatctgaacagcagaggaatcacacccagagcgaatctcaacgccgtattggaaactttaagtcttccggaagctgcggaatatttcagagcggaatacgggattagggaaagcgccgaagaaatcataagcggaatccatcatattatttactgcggctatagagatatggttcccctgaagccgggagttgtcaaagttttgaactctctttctcaaatggaaattcccatgtgcgtcgcaacttcaacagaccggccgctgattgaagcagcctttgcccgcaatgggatcgataagtattttcaaaaaatcattacgtgcacggaagccggtacaagcaaaagggaaagcaaaatataccttctggctgctgacaccctgggaacctgtccagaggatacctgggtattcgaagatgcttactttgcagcacagacagctaaaaatgccggttttcatttgacaggaatcttagatccgtcagaaaaaaaccaggaacaactcgcggatatttcagacatatatctgcattcctgggacgaatgggaggaataaagtatgcatacagtactaaccatagccggttctgactccagcgggggagccggaatccaggcagatataaaaaccatcactgcgcataacatgtacgctatgagcgctattacagcactcacagcccagaacaccaccggagtatacggaattcaggaatccacccctgattttgtcgcccgtcagctggactgcatcttccaggacatccctccggaggcagtaaaaataggaatggtgtctaatgctgagatcattcgtatcatcgtagaaaaactcaaagaatataatgccaaaaacattgtggtagatcctgttatggttgccacaagcggaagcagccttatgaaaaacgacgctgcaaaagcgctaatgacagagcttcttcccataggaaccgttatcactccaaatatccctgaggcggaagtgctgagcgggtatcatatcagaaatacgcaggatatggaacaggccgccaaaaaaattgcctcctttgtccctggaggaattctcataaaaggaggccatctctcagacactgctgacgatcttctctatacccatgaagcctccgcgtggtaccggactgcgcgcatcgagaatccaaacacacacggaaccggatgtacgctctcttctgccatcgcctgtaatctggctgccggacatcccctgaccgtctgcattcaaaatgcaaaggactatatatccggagccctaaaagcaaatctaaatctggggaaaggcagcgggccgctgaaccatatgtggcaggaaaaggggacgtgttctttttaaaaggaacacgtcccaaaatcatctcagggtgtcccaaaacaaagatgccctgtccctaatcacttttccagcactatttcctccgaatataacgcacatgcggcagccttttcctgatcttttgctttgatggccgtaatatcatctacaattacatacagagataacttcgtaatttctttttccttcagtgcataggtttcatagactcccatatcctctacccagcgcactctctgtccatcctgatcgaaaacagcaactcctatatgcagaggctcggaactgtccagataggcctctgtatagaattcttccgcctgttcttttcccaatgcctcttctgcctgtttttgggcatcgtcatatatcttcttgatctgctctgacggtatttcaggttctatgggttctacctttacctcataaggggtaaccataactttgcctatgccgataccgtcctcattggtgttgtttatttcatatgtctgaacattgtctgaggtaacagatactggtatggtgagatcccattccccccgaaagaagcatatcccttcattgccttcccctgccacatcactatctacggtacctgatttatcgccccagttaattgtatcccaggacactttcagttcgtaaggcgtatctattgcatgtaattcttccatcaggttaattttcacgactcccagaaacgtagttccgtttacctgtttcccctccaggctgaaatcgtaatccttttcctctgaaccgttaatggaatagctgcccaaaagctgtaccaaatcagcctctccggctccatctccccatcctgcatactgattatcatacccccacataactcccagagaatcttttctttccattgctattgtgataaacagtgaagtcccgtcgcagtatacttctgaggctgtcaaagtgatatctctgtctgtggcagaataagcctgtgcagatacctccaattccttctccccgccttctgcacccgggtcattgacggtattctcttcagggaccagcttttgcgctttatgggaataatcgcctgaaaaagaaatatccttttccacttgtgcaaagatatccccgagcagtggcagcttactggccatcaccgggttggcaatgcagactacaacgatacagacaaatacagccgccagactccccacgctgaccatggtatatttttgtatcttccgcctccttttcctttttaaaatacctatacttttctctatggttttgtccagtttttcttccggaatcggaatcttatgaaattcattgtacatatatataatcctccctgagatactctttcagctctgactttgctctgtgcagataggactttacggttccctcaggaatctccatggcataagcaatctcctgtatctgcatttcgttaaaatacttcaagataataactgttttgaatttttccggcagagcatctattgcatcgtataaatcccatttttcctccagtcccagccctttttccgcttctcctgtatacgaatcctcatacttttcatatctgtcacttttgcgcaggtgatccactgctgtatggattagaattctggtcagccatgtcttaaagtattcaggctcctgtatgtttttaactgattcaaacccctttaaaatgcagtcctggacaatatccagtgcactctgctcttcttttgtatatgtataagccatacggtataaatacttcttatatatctccaccaactgtccataggcattcacgttgcctcttgcggcctttttcaccagctttaactctttcttatctatcaccttactggcaaccttcctttctgcaagctcccgggtaagcttttgctttttcattgtacaataattagacggtacagggagtgtaaaggttgcagaaaaaaaagatttttgcttctttctgttaaaattaacgccattgaccccaaaagcgtgatgtgataggatgttataagattggaggaaataaaatgcaaatcagaaaaattactcagtgctattttagtccgagaggtactacaaaaaaggtggttaccgccattgcccggcaattcagcggtcctagtgtatcctttgacctgatggagcagcccttgactaagcaggagcaattatccagtgataccctactcattatcggcatgcctgtctatgccggaaggattcccaagatgtgtgcagaaatgcttaaaaatttgagaggttccaatacgcccgcaattgcagctgtggtatacggaaacagagattacgatgatgccttaatagaattaagagatctgctgaaggaaaacggtttttctcttatctccgccggtgcttttatagcacgccactccatatttcaggatgtggctcccaaccgtccggacaccaaagacagacgaatcttaaaagaattcagtgagaaatcctctgtcattctagataaatttaaggaaaataccgccacagaccttcaggtgaaggggaattctccttactgccagcctggaaatgtaccattaaagcccagtggagataaaaaatgtacagcctgcggtctttgtgtcaaagtctgtccaactcattccatagatattgccaatccaaagaaaacaaaaaaagacacctgcatctcctgcggtgcctgcatccagatttgcccgaaaaactccaggggatatcatggacctttatataaaattgcggccaaaaaattcggaaaaaaatgtgcggaatataaaaagccggaattattctaccttacataatccgggggttaaaaaaggggacgtgttctttttaaaaggaacacgtcccaaattcgatccggcctgtccccaattcaaattgacctgtccccggtgctgtcttcaaacttcttttctatctcctgaagcatcttggcataggataagaactctcctgccatcttctctttgtcctcacacgttctcttatagcagattctgtgctccatacttgcccaaaaatccatagacattgtacgaagctgaatctctacggggaaatacgccataccgtcttcatagtataccggtacccccagaacaaggtgataacttctgtatccgttgggctttggttctcttacatagtccctctcttttatgagcaccaaatctccctgctttttaatggtgacaacaagatggtatatatcctcttcaaaataacaaatcacccggattccggcgatatcctgcaggttttcttttgcgtcctcgggatgggattttagcttcagccgctttaattttccttcgatactttcctttttcttaatcctgtgctgaatatagtgaatcggacaattctggtacttttcttccagattgtgattcaatgcctccagtctggacatcagaatctggctggcatccatatacggctgtactaaatcgttatactgctctattgtcataaatactcccctttatatgtatatccagtgtcctcaccacaaccaccactttatcccagaattgtgtctattctgtgataaaaacttaaaactactattaagaaaaggcaggtgctgtcataccaaacagctcctgcctttcttctcagtaaatgctaaatcacctggataagattcagtttgtcatccacaagtaacagatcagcctctttgccgactgtcactgatccggttctgtcatagattcctatgcttttggcgggatttctggtggcggccagaactgcctcttcctccggtactccgaaggatattgcctttctcatacaatcaaacagattggtagccgaacctgctatagtaccgctgtccagcactgctttctgatctttcaccgtaactctttggccacccagttcataggtaccattctccataccggttgccatcatagaatcactgataagtgccacacgctccggtccgaacatcttaaaggttgctctcaccactgacggatgaatgtggattccgtcactgattaactccacaacacactgtggatcatccatggctgccccgataagaccaggttccctatgggtaaatggctgcatcgcattatacaagtgagtgatatgatgcgctccccgcctcattgcttctctggccacctcataatctgctgaagtatggccaagggaaatacatacttcatcttttacatgatcaataaactccatagccccctctgcggtaggtgccagggtcaccaaacgaatcaaatgaccacacttctcattacattccctgaagaattccacatcaggcttaacaatatattcctctacatgggcgcccttttttttcacatcaataaagggaccttccatattaattcccggaatagaggcacagccttcttttccctccacttctgctgctgtaccaaagatagcaagcagctgatctttgggcagtgtcatagaagtcgggcagtaagacgtaattccatgttccctctgatactttaggattatttcaagaccttttgcatctccgtcggaaaaatcatggccatacgcaccgtggctgtggatatctatcaggcccggaatcaccttccttcctgacgcgtctatctcagttacatctgtcacttcctcccgggaagctacaattttatggttctcaatataaatatcccgaaccgtgtattttccatcttccccgaagacagaaccatttctaattatcattccttacagcactcctttttctctgcataaggagagagctgcttcatctgcaataattactacatccgtgtgcagctgcagagcggaagcaggtacttgaggggtaattggtccaaaacaagaatcataaacagcctgggcttttccttcgccggaagctaccagcagaatttttttggctgccattatattgcctactcccatggaatacgcatatttcggcacatcatcaatgctgtcaaaaaatctggcattagcctgaatggtgctctctgtcaatgcaacgcaatgagttcccttttcaaatgcatctgacggttcgttgaacccaatatgaccgttgccgccgatgcccagcagctgaagatccacgccgcctgtggcttctatcactttatcatatctgccgcactcatagacagcatccttttccagtccgtttggcacaaaggttttttccttattaatatttacatggtcaaaaagatttgtattcataaaataccggtaactctgatcattatcgcccggaagtcctttatattcatccagattaaccgtagtcagttcggaaaaatcaagatctccctgctcataccattttaccagctgctgataagtccctacaggtgtagagcctgtggcaagccctaaaaccgcatcaggcttcataagaatctgcgccccaatgatactggccgcctttttgctcatttcctcataatccttaactgcataaatcaccatattaccccaatctccttttcatcattatttattatgatcacctttgtaatcatcattataaaacctgttgattttattttcaatattttatcttattttgaaaatactttcaaaatttgtgcataatacacgtaaaatatgtaatataaagaaataaaaataggctgttttactttctctctaaaagtattttcggcccggttctacagattttatattcgtataacagtgtaaatatatcattttcctgtgcaaaaaacaagaaaaaaactggcaggcaggattcactcaccgaagggcggacgtttaaacagccatattttactgaagaaagggcctgacaatacgcaagagggtgcggatgtgtccttaatggcaaggtgcttacaggcaattacgccctagccttaacattttcgactgggttactatctgcccatttatttatggaatagtacaacataacaagtgctgtactgagcattatcccgcctacaatatcagtaatccagtgagcaccggacagaccccgtccaatgaccgtataacttgcatagatgccacaaacagcatttactatattctgcttgaaattatgcaatagaattgcatcagagacgtaggcataatgcccagcatatctactacaagcagcgtatgaaaatgttggttgacttgtgaaaaccaactgatgaaccctgtgggccgattggacgtacatcaattaacctaatcaccactatatataggatgaacaaagcccacagccctacagttacaataaaattgctttaaattttattctttgtttctttcatttgtctactcctttttgtttaatatgaatggctcttacctaaacataatttaacttcagagtgcaaaaaatgaaagaatttcactgtcacatctatgatacgcttcatgtcataggcgttttagcaatgggataaaaaacaacatcacaacagaacaatctattaatccaaatactaaatcacatatatgctatgttttttggttactatctttttcggcgatgcaaatcagttctctattggataacaacgtccttattcccattttgatatggcagtccttgaaacaaataacatttcagaatactcttcttgtattaatttttttgtttcctaagagctggcagcttttcatgaaactccataagcgttacaccttgatttttaaatacggctacaactatatttggtctttcaatttatggaataggggcagtgcatacaaaatctaaaccgccctaactgactccaaaggccccttgctgagttctctattctactcgtaacttaagctcccctgaaaaatactttccgctgacaccgatatagttgctggctgtcggcaaggtgacagaaacctgttttttctcctccgtgtttaccaacacctgtttttcctcatccccagagataaaaaacacttctgcttttccgttctcaatagtgagttcacaggttaccgtcagttcatcgccgtcctcacgctctctggccgacgtccctccaaagagcatctctgttcctgaaaaatcctcatacactgcatgataagttcccacataactatccagaccttcttccctttcccctttcagcaaatttgaagccgtaagctccagtgcacctattgtttctacagcactgtgatatttgtttagtgctgcctctttagtacagccaataaaggtgagaggcaaaacggcaagtactgcgcctccaagaattattatttgtatctttattctattgatcatatggattctcctttgttcttatatctcgatgtatgatatacccaaaggcgcctcttctcccacaccctttaagggacgtacgacatacaccgaacgtttaaatatattatagagaatccatttttgttctgccattgattttacttacaattagaaagattggcttacattttcgtaagaaatgtcccaattatctatcttcaaaaaactataataccgctctgatttcatcccaactattggcggtgaagaagtttctttttcagtactttgactttatttatgtgtctgcttgtatacattacagccgttattaatgcacccagggccagaccttcgcagaagtccgcaaatgcccccggaactcttccctctgccatccctgtgcagtccaaagctaagaaaataagaaaagatataacacctacccaggcaaaaacatgcagttttttcatcagctttatcttctcatcgctgctatagtctgcaaccttcaaaaccgtctctttaatttctttatccataatcatcccgcctttcctttctccatcaatcagttcccctatctctacctcataaaaatctgctatctcaataaggagatctaagtccggcatattactgcctgtttcccatcgtgatatagtcctacctgatacatttaattgttcagccagttgttcctggttcagtcctttttctttgcgcagttctttaaagaaactgccagtttttttctgatccacggcaaagcctcctttcagccatatagtaacatttcacagtaagcaatatacacgacacaaagcgggaaaagtcatatatttgctgtaaaaagcgggtagacatggaatgtctggtgatactttatcccctctccgacaaaaacgcagtaataaccctctcatatccctctgtctccagcagcatggccagatgccctccgctgatatctctgcggatcacaggctctggcatgatatcttccagggcttttttcacagtatggttaaatgtagtatctttctctgacagcatcagcagaacctttcctctgtactttaaaaaatcctccggtgtgtgatcccagcaattcttaagatccagaaccagcctgcagacgtgttccacataggagaccggcagttcctccataagcacacgtacaaactgtgccacatactctttctggccctggctgtaccctgtcaattttttattcaccatgggccagagagcggattttataagtcccaggggaacatgccggaggaccttggtgatctgctgcagttctctgatcagagcctccatcccttctttgccttctctgtccatgtccttggccaaggtccctgtatttgtcaggatcagaccttcgactgcctcaggatgatttttagccaatacctgtgccatcagtcccccgtaggactgtccgaacaaatagtttcgatccgctccgagcctgaacagcagggcagccactgcgtctgtcagttcccggcaggttgcgtacccctcctgatagtcaaaagccagtacggagtattcggaagacaacgactgaaaaagctcccagaacaattctgtttttccaattcctcctgtaaataatacgatggtaatttcaccgccgctgtgatatctgtaaaaaaactcttttctttctatctctgctctctgcagaggatatgcattatgaaattttcttaattcgtcctgtatactcataaaatctcctcacctgatccgctgtctattagatagtatgattctaccacggaaaacgtcttcttaatacccatatttcttcttatacttttcaaaaaagaaaaaggacagcactgccgccatcagttccgagaccggcactgccagccacagcccatccagtccccacagtacggggagtgtcacgactgctcctatcaggaatagaaatgttctgctgaaagaaatgactgcagaaatcaggccattggacaatgctgtgaaaagcatgctggaaaaagtattaaaacccaccaagagcagtgcagcggaaaaaagtttattacctcgtatggctaacaggtatgcttctgttcccggatgtgcaaatataccaaccagactctctgaaccggcaactgcacatattgttgtaactgcagcaaccaggccgataaagaataagctgatgtttctaagcttcctcagtttttccctgctattccccccatagaaataactgagaagaggagatactccaaacatataccccatatacaaggcactcatgaacccgaatacataaaaaataatagtgctggcggcaactccagcctcccctgcgtatctgagcatacactggttaaaaagcagcattacaacgccgcttaccagatttcctgagaattcggaaaagccgttagaagctgtcttcagaagtattcccggccggaatccgggcatagcaaaatgaagcatatgctttttacgcataaagtatactgtcatagtgaggcagggaatcatcattcccatgccgctggcaatggctgcccctttcattcccatggaaaacacttttatcagcagataatcaaatagaatattaaagattcccccaaagattgagctgaacatggcaaggccggatcctcccgaagcgataacatacatttcaagattagaaaacagcagatgaaagactgcaaagaacatatatgaaaacagatattctttgcagtaaagggaaacctccgcggaagcatggaaaacgcccgacagctgccctgcaaaaacagttcccgtaattgtaaaaatgccgcctatcagcagattgcagagcatcagcatggtaaagtcctcacatgcctccctgtgacgcccctctcccatctttttcataacaacagcgctccccccggaggcaaacatcgcggcaactgctgtgagtatattaaagtaaggggaaatcagggtcagcgcagacagtgccgactcacctatcaaatttgccacaaatataccatcaaccatagaatacagcgactgcaccagtgtcattacaattgtaggcagtgtaaacttcagtacactgcccatacgaatgggttttttataaatttcatgaatcattgcgaataatcctccctgccttgacttgagtttttggaaacctgtgccctcccgcagtacttgcattggggagcgccctttgggtataataaaggatacagtaactgtaatgtcaagaagaattttttacggaggaggatgccaatgaccccccaaaagcaattgtttaccgccggggaattcgcccggctgacaggcgtaaataagagaacgctgcactattacgatgagatcggcctgttctctcctgcccaaaagggcagcaacggataccggtactatacttatgaacagagtctgacactggaaatgcttctggccttgcgggaagcaggtatgtcaatcaatgaaatccgacattatatggaccaccgttccgccaggcttttccacgagatggttcggcaaaagacctctgaaattgatgcctctgtcaggagactgaaggccataaaggagattctggaagaaaaggataaaatgctgtctctctccgaatcggcaaagctgaaccagataaccataaaagactgcccggaagaatatctggcattaagtccggcggtctctgatccagagcaggagatggctgcactcatccggcacatgaaggaaataacagcctatactccctaccggaaaagcttcggcagtatgttgtcggcagagaagatacaggcaggcaattacacggattatgactatctgtttacacgaatcagcaggcccaagactaaaaaaggcctttacaaaaagcccaaaggcaggtaccttcaggctttctgtaaaggaagctgggatgatatcccttctgtatatcaaaaacttatgtcttacgcggattcccacgggttactgctgcgggggtattcctatgagataggcttaaatgagatggccatcacccggatggacgaatatgtgactctcatatctattctgtgtacagagcgtatggatgcctgacccctacacctgcagtattcttgccagatcttctttcggggtactgataggcgcaatgtgataattctctaccagatagttcagtacattttcagagacaaaagcaggcagacttggccccagatatatattctgtattcccagatgaagaagggtcagaaggatacatactgctttttgctcgtaccaggagagaatcatagacagaggcagctcattcacactgcagtcaaatgcctttgccaattccactgccaccataatagcgctgaaagcatcgttgcactgccccatatccaggattctgggcagcccgcataccgttcccagatccatgtcgttaaaacggtattttccgcatgccagagtaagaatcaggctgtccttaggcgcctcctgtacaaattccgtgtaataatttcttcctgttttcgccccgtcacagcctcctaccaggaagaaatggctgatctttccggatttgacaccttcaatcacagtgtcggcagcgcctaagacagcgtctttcccgaatccggtagtcacctgggtacctccgtttatgcctgtaaaggtcatatcctccggatatccacccagctgcagggccttttctattacaggtgtgaaatccttctccccgccgatatgggtcattcccggataggcaactacatctgtagtaaacactctgtctttatagctgtctcttggcggcataaggcagttcgtggtaaacagtaccggtgcaggcagatctgcaaattccttctgctggttctgccaggcggttccgtaatttcctttcaggtgggaatatgcctttaatttgggatacgcatgcgccgggagcatttctccatgtgtaaaaatattgattccttttccttctgtctgttccagaagaagctgcaggtcacggagatcatgtccgcttactacaataaaggggcctttcgggacagaaagaggaacggttacaggagaaggaatcccataggcagttgtatttgccctgtggagaagctccatacatttcaggttaacctcgcccacctccaggaccagagggagcagcttctccatggggagttccgctcccaccgcaaacattcctttgtaaaagaactggtttacctcttcgtccgaatatcccagcaccatagcatgataggcataggccgccattcctcttaatccgaacagcagaagggattttagggaacgaatatccggttcctccttccatagcttttccatatcgtattcgtcatttctcccgcagggcgtcctgcacacagagcactgtgacaccagagcttccttctctcttctcacttttttaatttgtgactgaatggattcctggtcaaaatttacattcgtcagtgtgataaataatccctcaatcatagcacggtgggtactctcctgaggcatagttccctccgccgccctggacaaggctatgagtgctcctgtcagttcatcctgcagtttggcaacatctgcactttttccgcagactccggcttttcctgtacagccggtacatccggctgtctgttcacattgataacaaaacatgtttcccatagtattgatctccttttctctatcccgttaacgggttgttttacttcagaatgttacccttaattccaattgttacggtgtgtacctgtaaatttttcccgctgtttttcacagcatcctccactgcctgcaccattccccggcagcagggcacttccatgcgcacaaccgtaatatctttaatctcattttccatgagaatagatgccagtttctcgctgtaatctgtactgtccagtttcgggcagccgatcagcgttaccttatcctccataaattcccggtggaaatctccgcaggcataagccgtacagtccgcggcaatcagcagccttgcgttctggtaataaggggctgacaggggtgccagtttaatctgtaccggccactgccgcagacatccgtttaatttctgaggctggctgcccggacatccctggaaaggggctgcctctctctcttcaaaagatatggcgcctgtaggacagaccggaagacagtcacccaggccgtcgcagtagtcttccttcatcagcctggctttgttatctaccatttctatggcaccttcatggcaggcttttgcacacagaccgcagccattgcacttttcttcatcaattttaattatttttctcagcataacttcagcctccctgagtcaaaatgtatcgttacctttggtttcttgactatctgaggaaagcatactatacttgcagtagtaaatcggttgtttttacaacaaaaagagggaaaatgaaaaaacaaatagaaattctaaaagatacacctctgtttttcggggtgcaggaacatgagatcgaggaaatgcttggctgcctgtcctcttcggaaaagacttataataaaggctcttatattcttaccgcacaggatcctcctgttaatgtggggattgtactggaaggcagcgttcatgtgatcaaagaagacttttggggaaaccgggctatcctggccagaataggagcaggaggcatgttcggggaggcttttgcctgtgcacaagcggaccatcttccggtaagtgtggtagccagagaagacacggatgtacttttcattgactataaacggattattaccacctgctcctctgcatgccattttcatagccgtctcatagagaacatgcttcacatcctggcagaaaagaatatcctgctcacccagaaaatggagcatattgtcaaacggacaacaagagaaaagctcctgtcctacctctcctggcaggcagtgcaggccggttcctcttattttatgattccgtttaacagacaggaactggcagactatctgtccgtagacagaagcgccttgtccagtgaactgggaaagctgcaaaaagaaggaattctggagtatcacaaaaaccagtttaagctgattcatgcctgaggtttcctcccggtctctcaggcatgaacacgctgcattatgtgccaaaattagggaataaaaggtatgcatataccatggacaaaacgcagtaaacgattgtcataataataaaagctttaatagtccttttaaaaacttctccttcggcattctttaatcccagagttgcatttaccgcaataatattattcggacaaatcatattgcccagggaacctcccgcgctgctgctcgtaaccgctactatctggttgatgccaagtgtagttgccgcttccagatggagcatgcagaacaatttattggatcccaggcaggatcccgtaataaacgctccgattgcaccgataaggacagagactgcaggataaaacttcccggccaggtcagccagaaactgagcaatctgggagatcatacccgaactgttcatcaggtttgccaaagcgtaaagggaacacagtgtgataataggtttgattaattttaaaattgcattcttctcgcacaacaaaaatttatctgcgcaccccataaaaaatgaactgatgagaactacaatatgaataacagccccaatccaggtggcatagccgtacttcgtaagtgcactcagcggaaagctaaagcgcaccgcaggcagtaaaatcaggagcagaagatagggcaaaaaggctttgaaatttgactgatttgtttcaaactctgtggaagaatcatttatgtatgcagcattttccctgacgcccaccagctttaaataagcgacggatataatcacgcccactacaccggatattaaatctgatagttcggctccgataaagttagacactaaaagcatagctatactcatgcctatacataccgtcgccagatatccccacataccttttaaacttttggtcccatacaagacaatcaaaagaacaattggcaccaccaggcatcctaccgccagaaatcttcctgtcatggcaacaatatcctccagcggtacggtccctgtaatcgcgctcatgccggcaattgtaggaactcccgcacctccaaagcacggcggcaccccattgcagatcaggcaggcggcggcagccaccaggggctgaaatcccaatcccagcaggaatggggccaaaattgcggccggcgcaccatttcctgtggctccttcaataaatactcccagacagaaagcaatgagtacaatttgcacgcggcggtctctggtgagagaactaaccgttgtttttatgcgattcatgcccgtgctgacctgcattaattctaacagagaaaatgcgccccataccagaaatgccacctgcagggcagctatcacaccgctcctggaagtatcaagcataccggccggttttccggaaaatgctgtgactgcaagtaaaaatgtaatggcgacgcctatcagagcgactatccaggccggttttttcagtattacaattccaactaatacgattaaaatgggaattattgctaataatagagacaataaacttccccctttctgcagaatgcctgttcactaataatttgcacttgctatcataccgcttattttttccgcaaccttgtccagttcgagtctcctctctggggtgagctgtggaataatcacttccttcacgcctccacttcccagtttcaccggcaggcccatggcgcatgaggaataccccagatgctcacaaagcggcgtcgaacatgggaggataagatccctgtccttcacaatagcttccaccatcattgacattgttactccggaagtatagccggtagtcgtgcccgtctccaaatccgtccaatgcctgaaccattcaccgcattccctctctatctgcgactgctcttcctgggtaagttccaggggaacacctccataggtcatggactcatacagccgaagagctccgcccccgtgttcaccgatacacagtgcgccgatatttgcatattcttttcctgtaatcatttcagtggcccatttgaggcgaatcgtatcattgcctgccagacccagaaattgttttttatcccaacccagcagcttttggtagatgtagacaaagacgtccaccggatttgcagacacaatgacaaccgttgtcggcttacaatgtttctttaattgttcacagatgggagctataatttctacattcatctgcagctcctgcgcccggtctttgatctccttagaaaacggctttgctgcagcacttagaatgatgtcacagtcagaaaaatccgaatactcttttgccagagaaacctttgtccggctcaccggaagaaatgcctggttcatatccatcacattagctgccgcaaaattctccttcacatccattaattttatttcttccacacagtcccgcaaacccacacaaaaagcggttgtcgctcccaggcgccccgcgcctcctattacaccgaatttcatatttctgctcctttctatccttcactccattccttattctgccagcctcataagtatatggaatctctgatccgctatctgctgaatactgtagatatcttcatctgtaagattcttgaattttccaatcccctgtataaaatcctttacagatataggtgttttattgctcacattcatgtgatacccgtcctcgtccatctcccatagaggaaacatgttagaccttacggcatttctggctacctcaatggctttttccggggaatatgcccatcccgtaggacagggagaaaatacatgcagataggcaaagccttttttgctggccgccagccctttctctacttttctcacaaagtctgccatgtgggacggtgacgccgttgcgcagtaggtcagtccatgcatggacataatcagaggaagatacttctgctgctgctgtttgccgtttatcaccgttcctatgggggttgtggatgtcctggaacccttagtcgttgtggagcttctctgatagccggtattcatgtacccctcgttgtcatagcagacatagagcatcttttcatttctctccgcagctgctgagagactttgaaatccgcagtcggctgtggctccatcccctgcgattcctataatattcacctctccccttcctttccgctcatacatctgactcagcccggtaaggaaggatgctgtattatccagcagagggatatgcacaggaatcttaaggccgttggcgtaattccaccctaccacaccggctcccgccatgcatcccgggggaatcccgacaatcgtgtttttacctgctatcttcagaactgttctaagtatcaactctccgccgcacccctgacaggcagacatgcccggagttacctgatcttctgcttcttttaatatatcaatatagctcatttatcttcctcctatctagtcaaccatataccactgggtttctctttcccccggttcattcttatgggcgtccagatttctgattgtctccatcatcatttcaatggaaatatctgcgccccccaggccgccgattgcggaaaaatggcagtatctgctgtcagcgtccgcaagtgccgccttgatttccatatgcataggtccctggcaccatccaaaacttacacttctgtcgatcactgcaaacgctttcttatctttcaaagcatctcttattttctctgccggaaacggccttgtgaagcgcagtttaagcaggcctgccttaattccctctttcctggccagatccaccgcatccattcctgttccggtcattcccccgatggttacgatgacaacatccgcatcctctgtccggtactgagagactgctccgccgtaatagcgtccgaaggcatctccaaatttcttgtccacctcatcaataacttccagggctttcttcattgcatccagatgagattttctgtatttcatcagaatgggacctggtgtaagaggatccagggcaaagggatgatccggatccagcaccccgtggtgaaaggaaggcggcggcaggaatctgtccacctcttcctgcaggggaagatccacgccctctgtgagatgagagctgtaaaatccatcgtagcagacatttactgggagtaatacctccgggtgctcggccagcatatagctctggaggatcatatccacgatctcctggttactgtcacagaacatctgaatccatcccgcttcacggacactcattgcatcctgctgtccgctccacacagtctccggagaggtcatctctctggtagccagagccataaccataggaaaacgcagggtagacatacgaaagtagggttcatacatcagtgccagcccctgggcggacgttgctgtgaacactctgccgcctccggcagctgccccctgaaccacactcatagcggaatgttccgattctacctgcaccaggttggcatctatggctccgtcgtgaaccagtccggccagatattccactacagacgactggggggttataggataggcggcaatcaaatccggatgacacaatgctgcagcttctgccgcagagtaattacctgtaagaacttttatcttgcccattatcttgaacctccttccagtaccatagcaatcgcaccttttttgcactcattggcgcagatcccacatcctttgcagtaatcataagtaatctcaaaccttttacccacggcgataacggcattgaccgggcagcttgccagacacataccgcagtcgatacatttttccttgttcatcactggacggtatactctccagctggctgtatcgagaatatacattccttcatccccgatgggtgttatatgtaaatgcttcaccataaacttcctcctactcttttaagccggcagcctgccggtaagccttttgggcagcctctctgtttgcagctccaaaggatgcctccacttcctgaaacagcacatctttgtccaccagtcccgaaattttggcgaatgcccccagcatcgccgtgttgggaatattgcgccccagaagctcttctgagattccggttgcatcaactacagcaaccttccctgcacaggaaggaactctcaattcctccggggttttgacagaattaataattacagtaccaccctccttcagacctgcatatgtacttggaagggataccagagagtcatctagtatcatcagaatatccggttcatacacctgcatctttctgcggatgggttcatcggagattctcaaatagccaaataccggggagccttttcgttctaccccgaaaaacggaataaactggccatacttttctccggctacggcagcctttaccactatctgggaagcttttacaactccctggccgccacggccgtgcaaacggatttctttcatgcgcatttctctcctttatagtttattttacgagtaaccttttgtttttcgttttgcatgtaaaaacattgttttatataataaacactttgtatctttataatatatttagtttttaattctgtcaactattctttagctgtaaaagtgtaacatttttcatgtccatttttgtctataatatataaaacattcgtttactatgtgaaacaatcgttgacggacaaactgtttcttgttacactgaaaccatattatccaaaggaggaatgccacttgaaagaaaccgccaataacgaaaaatatattctccattctgtggaaactgcgctttccgttatggatctcttttttacttacgaagaactaagccccagcgatgtaacccgctatctggggattaaccgcagtactgccttccgttttctggtgactctcgagcaaagcggctacattgttaagacagaaaattctaaataccgtctcagtgtcaaagtgtcaacgcttggccagattgctcacaaccgcatggaacttatcggactcatacatcctcatctttgccgtatctcagaggcaaccggagagtcttcccatttggtcatcatggacaatccaactcatgttacctttgtagacaaaagcatcggatccctgtggctgaaaatggatattcttctgggttacacacagtatgcacacctcacagctaccggaaagtccatacttgcctacgagtcagatcagttcatcaaccaatacatccgctctgcagtctttgagcagcacacaccatactccattaaagatgccaaagaactgctgaacatcctggacaaagtaaaaaccgatggatattccagtgataacgaggaaacagagatcgggctgtcctgttacgccgtaccaatcctctcgttttccggaaggcccgtggccgcaatcagctcctccggaccgaccacaaggatgctggccaataaagagaaacatctggaagtactacacaatgcagcagagcagatccaaaaagggttgcagtaaaaaagggggacgtgttctttctaaaaagaacacgtccccaaatcgatcaggggtgtcccgaattcactttgccctgtcccctttttatctttcttaattttcatattgactcccatacccttatatgatatattctgatcaaacaagttcatatattaaaacgtcgtttattatattaaacactttgtaaattgcattaatatcataaggaggcgtttatgaactatcgactgctaattattaatatgggctctacctccacaaaggtaggtgtttatactgacgacactgcgctctgggttcagtcgattactcatcccagggaagtgattgcaggatatctgcattttatggatcagtatgagtatcgtatgaaggcaatcctctctctgctgaaggaaaaaggtgaactgctggaagcttttcacgctattgtaagccgcgggggcacaatacagcctgtaaagggaggtacctatgagatcacgcgcaaaatgcttgcggattcccagtgcggcagatacggggatcatccatgcaatatcggagggcagatcgcctatgatctcggacagaaatacaatatcccggcatttaccgtagatcccccggtatgtaatgaaatgtgtgaggaagcaatttattccggccttccggagattgaaaggattgcttcatttcaggctctgaaccaccgtgccactgcgagaaaatactgccgggaccacggagtggattactcagaggctcatctgatagtggctcatatgggcggtggaattaccgttgccgcccatgagcagggcaaaattattgatgtgaataatggacttgcaggggatggtccttttgctctggagagaagcggtgacctcccggtaggagaattgattaagctttgttacagcggccggtacacgcaggatgagatgctccgcagggtaaatgggcgcggaggcatggcggcatatctgggcacagtagacggacaggaggttcagcgcagaattgattccggcgacaaaaaggctgaatctgtcaccagagctatggcttatcaggtttccaaggaaatcggaggaatagccgcagtgatgaaaggaaggatagacgccatagttttgactgctggtctgggatattgggaatattttgtcaatcttatcaaagagagagtctcctttctcgctcctgtcgctgtctatccaggggaaaatgagatggaatccctggctttgggtgctctccgtgtcctgagccgggaggaacctatacagaattacgatgaacagtctgcctgagaaaggaggatttccatgtatcacaactttgaggaattcatgaaagagataagtaagaatactgataagaaaatcatagccgtagccgctgctcatgactcagaggttttagcatgtgccgccttggcgcgaaatgagggaattgccgcttttacgctaatcggaatcgaggataagataaaagaaattctcctgtctctaggagaagaaccggatatgtggaatattatccacgagccggatgacacaagatctgccatgctggctgtggaactggccgcgaaaggaaaagcggacgctattatgaaaggtctcctccacacttcagcctttctgcgtgccctgtttcacaaagaatactgcctggtacctccaaaagcgcttgtcagccagataaccgtcagtgaatttccccaggaaaacaggtttatccttctgactgactgtgcgatcagcgtatgtccttcctatgaggataaggttcagattatcagaaatgccgtatctctggcacataaactgggagtccattgtcctaaggttgcctgtatcgctcctgtggaggtgattaatgaaaaaatgccggagaccattgacgcggctatgctctgcaaagccaatgagaggggccagatcagggactgctgcgtagacggtcctcttgctctggataatgctgtgtctgcccaggccgcagccgcaaaaggcatttccaatcccgtcgctggctccgctgatattcttcttcttcccaatctatgtacaggaaatgctctggataaagcgctgcggtatttcgccgatctgaagacgggaagcgcagtcatcggcgcacgtgttccaattataatgacatcccggtcagattctgcccggaataagctccatgctgtggcgctcagtgttttatagccttccaaaaacggagtagaaaagcctctgtaacctatggcttttctactccgtttttttcacatatatctgcaagacagcacctctcgcaatggggttttgtcctggctgtacacacatctctgccgtgatataccagcctgtggcagaaatcacttccctctttcggaggaataagcttccacagtgccatctctactttttttggttcctttatcccatccacaagtcccatgcggtttaccaagcggatacagtgcgtgtcagtgacaatggcaggttccccaaagacatcccccatgatcaaattggcactttttcttcccacaccggggagcttcagaagactgtcaaaatctctgggaacctttcccccatactcatcctttaatattttcatacaggcactaatatctctggccttgctcctgcccagtccgcagggctttacaatgcgctctatatcctccggatccgcagctgccagggcatccacatccggatacatggcatagagatcctctaccaccacatttactctggcatctgtacactgagcagccagacggacactcacaagcagcttccaggcatcatcatagtccagcgtacatccggcctccggatattcgattttcagtctctcaacaatttcaagagccaagttctcctttgtcatacagtttcctctctattttcccagtcctttcccctgcaggcagacatttcctccagcgcctttttcagcgccggattaaaaaagttccagtcatggatccctttccactcttcataggcaaaatcgaaatccattcctttcatttctctctgaaatctgtcattgtcctcatagagaaaatcacttgtaccgcaataagcccggatcacaggctttactttctccccttctatccttttggccagttctgtgatatcatactccggcttatattccagcgattctccaaaaaccagccccagatccggaatacccggaacatctggaacatctgcccctctctgctcatccaggatctccctgatatacaaaaacgcagaggagatagcgccacagaaaccatattgttccggcctggaaagggcacacttgagagcaccgtatccacccatagacagcccgataattgccgtgtcttcccgtttcaaagatatacgaaaaatattcttacaaatcgccggcagttcctctgtaatatatgtaaaataccgatacccatgtaccatatctgtatagaagcttctctgcacctcgggcataatatagatagccctgcaattttttccgtaatctgccagcatagtataattcagataatctgtacaactgccgcttaagccgtgaagcagataaactgcctgatagctctctgaaggcaaaagttcatctggggccataacagaaagacctgtattcatctgcagtgtctgtgaaaatatacttcctgttacaatcatatatcctctcctcctagtttgttgacagtgcatccttcagttccgccactgtccgtcccagtaccggatgcctgaaatacggagcaatctgagccatgggcaaaagcacaaagtctctcagggggattcctatatgaggaatctgcagcgtctccgtgtccaggattaagtcatcataaaaaaggatatccagatccagagttctggggccccagtgaagcacccgttttctgccagcatcctgctcaatgccatgaagcatatccaacagttcaaaaggggtcagaagagtcatcacttctgcggccccgttcaggaacttatcctgatctgttaccccataaggctctgtaacaataaagtctgataccctgcccacccggcagctctcctgttccttcagcgcctccagagcctgggtaagatattcttctttgtcccccatattggacccaagggcaatgtaggctctgtgccaccctctggtaatctcaatagaaaccgtatccagaggaagtccgataggcgcccagggctttttaatctccagagtcacctgggtcagcagggagaagtgaagcagcaattcccttgccaagttttccgccactgcttctatgagcttaaaggtgtggttctccatgtattccttcataaaatggctgacttctccgtagttaacagaacgctccaaatgatctgtcaaacccgcttctctggtatccatatataagacagcagaaatcaaaaacttctgtcccagctttgtctcctccggaaacactccgtgattgcagtaaacctccagattctgtatcttaatcttatccattattcagcctttcttcccaggatcgcttccgtcatctgtatcaccctggcattttcttttatatcatgaacccgcacaaaagcagccccctttgtcacacccagcacggtggtagccagagttccctctactcgctcacccgcaggcagatccagggccagtccaatcactgattttctggaggttcccagcaggatggggcacgccagctcatggagtcgttccagacaccggatagcttccagattattttcataagttttaccaaatcccacgccggggtccaatataattttgtccattgatatgccggctctttcggcaatagccaatgtatctctcaaatccctgcacatatctgtcataaagtctttatagtccggctggtttctgttgtgcatcaggcagcaggctgcccctgacgctgcaatcactcccgccagttcaggatcatattttaacccccagatgtcgttcaccagatcagcccctgcctcaagggctgcctttgccaccgcacttttataggtatccactgacaccggaacatcaaatctggccttgactgcctcaatcaccggtacaacacggcgaatctcctcttcctcggtaatctgaacatgaccgggacgggtggactccccaccgatgtcaatgatatcagcgccctccccaatcatatcctctgtgtgctgtaaggccgactctctgttattccatctgcctccgtcggaaaacgaatcgggagtcacattgagaattcccataatataggtatgattcgctgtgtcaaatattttatttccaattgtcatcataacttccgtctcctgtattccattagtactttaagattaaattttttttctccgggctccagtcacactgcgcttcagcctggcatccgaagcagctcctggacatcttgtcagcccggtatatgatacctgccagattcttctctccctgtaccgtactgtccctatgcctgataattgctgtgagaatcatcctgcgctcttccagttcaaagccgcagtctgtaaggatcccatctgctatggggacgctcgctttctgatgaggcgtcttgtcccggtattgtacatggcgcccgatatcatgaagaagtccagccgcataaatccactctttttctatctttaatccttcttccagactaaaaagataggccagacgagccacatccaaaaaatgcgtcatgtcatggccacagaaaattcgttcttcttcgtatcctcttatcttttcaagacaatctatgtacgtaggatgctgtaaaatcctgtttactctctccatctatttcaccagctgataaaaagtgttctgcagttctgtattgccttcaaagactcccctggttaccatggtgacggtcttggaaccaggctttttgattcctctcatggtcatacagagatgttcagcctctatcatcaccataacccctttggggctcaaatgatccatgaaagaatctgcgatctgcgccgtcagctgttcctgaagctgaagccgtcttgcaaacacttccaccgtcctggcaattttgctcaggcctaccacttcatgatccggtatatatgcgatgtgtgcttttccatagaatgggagcatatggtgttcacagagagagtaaaacacaatatccttttctactaccatctcattatttgtcacatggaaacgttttttcagatgctctcccgcatcctcctccatgccgcccaccagctctgtatacattctggcaatgcgatccggggtctctatcaggccttccctattaatgtcctccccgatcccttccagaatgagtctgactccttctctgactttatcctgatttaccatttcttttgtctccgttcaaaaatacttagtatactaatcgatttcttattatatcatgccttcggcatgatcgccactcgccgctcaccaaaagtgagcaaagcttcctatggctcgctaacgctcattatatcatattttccggcaaaagaaacgataaatttatacatctatccctaaaactgtacattcttctacttcaaggccacacaattcacccgcacaatagtatccccttcgttccctttgattatcacctggtaatccgtgtccatatcatagggctgcatcagaggctgaatgccatatttttgatacatgagcctcttttccagggctttgatctttgctttgctgtctatggtctcccttttgatagatacccggccgtaatcggtccaagaaccggactctttttcctgggtgacagcgacaatcttaaggatctcgtaatcactgagtcttttatctgctgggatccctttccctttcaggaaattgacagtttctgtaaaagaagggtaaatatagccaatgcctccgttcatacttccttcctttgaaaaattcagcataccgaggggcacaccctccgtagcctcctccatggataaatcctccaaatctcttctataacaggcgaacagctccattttttcttcgccgctgagatcaggcgtcagcgcagacactccgttggaccaggtaaactcatagccattatcaatatcctcttccccataggaaattagtgacaccgttccggccttatactccccgctctcatatatgggctgaaatgcttccaaatccacggaagaggttacaggatactgccgataaatatcggatccatttttcatatgataggcaaccgcagcataagtaatggcctcctgttttccctctgagtgttctgacagactccggatccattccaatgccgcagattttctctccccggtaagttccatatgacggaaacggctctctgccattaaatcattccttagatcctcttttcggaattcgctgtaagaagcggtatcatccatacccttaatacttaccgacacagagcttatctttccttcctccggcagataagaatcatatctccagagatcccaataaaagctgcacgcaatcaatgcacacacccctgcagtaagaagcatctgccgctgtctggacagcatggcccgaaaacggaattgaaaaatcacctccgccagtccgtggaaggtgaacactgccaccagtattcccgccagcacccacaccacagaactgctctgtcccccgcagaggcggaagaaatatccccccatcaggcccaaaggaactacaagcaggaaccgaagaactggctgcgcggcaggaaatgctattgctttacctgccgcttctgcggggcggcggtaaaagaataccctgaccagaacgtacagaacagctgccaatcccagggcagccgcaagatacggggcatgagcacgcagggaccacctgcctgcccccgccccatattccccggaaccggccatcctctgatataaatccagaggagaaagatacagttttatacgcttcagccagtcggcctgataaaaagtctgaaagaacatcttactgtacatctgtacaataaccccaaaggtcaccgacacgtaaaaaacgaaaaaagccagcagccccccagtaatcacaatatttcccgtcagcagcacggccagcaaagtaatatggtagaacagaagaaagcctgcggctgcaaccagaaaccctgccagtgccagaaaaagactgtcccccaagtgctttgaatctttaataaaccagcttaaaagatgggaaagcaaacagggcgctgcaaaaatcagaaatccattccagtaagcagcagagaataacgttcttctcctcacaggcagactgaagtaaaagtctgtcctgtcctgggaaaagagataggaaaatccctggataccgcacagaacagccaggagaatactgatcgccataacagtctggttccccggaccaagtctgtcatccccagcccagagcaatccattccccccggacgcagtttccagtacgtacatgccaaacaaatagcaggaaagtaccataagccatattctcctcttgaaatcctccttcattcttttaagaaatgagagtcttgatgtcatatccaatggcctccgtttcattcacaaatatttcctccagagtaagaggcagaaattcccagcattccggttccagaccctctaccgctgcccgaacttcctctttcccccctcttgccagaaaggtagtcaaaaatcccgtctgcctgcaggacaccagggtaagtcctgcggataacaattccttaccggaatctttaaaaatgccctgcaccttatgaatttcatattccatattctgtatatctctggacaacaaaacaccgcccttatgcaaaattccaatgtagtcgcagcattcttccagctctctcagattgtgggaagcgattaccaaagttaattctcttcgccccatctcatcccgaaggattcctgtgacggactgacgcacaataggatccaaaccgtcgaatacctcgtcacagagtatgtattttgtgttggcgcacacagcacataagatgcttacctgctttttcatccctttcgaaaacgtccgaagccgttgattttcctcaaatccaaagtattccgccaattctaaaaaccgttctgctaaaaagtctggatatgtatttttgtaaaaccgggccatgctggcgatggttgcatttggaaaaaagtatggtttatccggcaggaaaaatattttttctttcacagcgggagtatcaaagatattttctccatcagctgtaatcctccctttgtccggccgcagaataccggctgcgattctaagaagggtggttttcccggccccgttagtccccagaaggccggtaacggccccgtcctgaatcgtcagcgttacgttgtttaccgctttgatctcttcaaagcttttgcttatctcccgtatctctatcattttctgtcagattcccctttctgtccggcagcattactgtaaatacagtcctatcctccccgctatcagcataaatctctcctccgtgggcctggacaatttctttggcaatggctagccccagacctgcccctcctgtatgggttgaacgggaattatccagacggaaaaacttctcaaaaatggtctccagctggttctgaggaatcggatctcccagattagagaacgtgatcttcaccttgtcctttgcatggcacgcccgaatttcaatgacagtgttctcatagctgtaggcaatggcatttttcagaatattattaaatactctggccagcttttctccgtccgcccaaatccacagctcttccggagtgtggatctcgacttttttcctttgctgctccaatatgggataaaactgctcacccagctgttggagaagaaaaccaagattggctctccccagattgatctgtattgcctggagattgaatctggtaatatcaaaaaattcgtttataagttcctccagacggtatgctttatccagtgttatcccaatatattttgctttttgcgccgggggcatctccggcacctcatccagcagggacagatatccgataaccgaggcaagaggagtcttcagatcatgcgccagatacgtaatcagatcgttccgctttctggtttccttttccagaatccgaacctgtcttacttctttttcccgaatctgatgaagctgtgcttcaatcctggcgtaatctcctggaagaggagggatctccttttgattttcctgaaattttctgaggatatcagctattttaccaatatcctgctgattcttttttttggccatacggacggcaaaccatcgcaccagaaagaccactaccagcacaaatacaagaaaagcaggatacaaaaagcttttcagcgcataccagttgattgtctgggattctatataatcatttgtctcggcattcagaaacgtatcccggtaaacaaaagaattggtaaaccagtctacaaatatcccgttaaatgttgtatccagaagcgtgtaaagaaaactgcagactgcaagcacaaggatgccaagcccaactgcctttactgctcttacccaattattcttcaaccttataccccactccccagacattcttaatgtatttcggattttccgcggaatctttcattttctcccgaatatggcggatgtgtaccatcaccgtattattgctgcttgtaaaatatttctctttccaaaccactcgaaacagttcctcagagcttaccaccttccctttgtttttgcagagataccaaaggatggagaactcaataggcgtcaggctgataggcttttcattgagccagcagccgtgcttttctctgtccagaaccagcccggatacagtaatcacgtcatcctctgtccccggactgctgtatcttttatacctgcgaagctgcgcctttacccgggcgattagctccagcgggcgaaagggctttgtcacataatcatctgcccccagcgtaagacctgtaatcttgtccatttcctgctctctggcagtgagcatgataatagggtacgtatagctctcccggatcctctgacacagcgtgaaaccatccaaatcaggaagcatcacatccagaatcgccaggtccagggatgtagtttgtacacattccattgcctccgcacctgtataatatttatatacctgaaatccttcatttgtcagaaacaattccaccaaatccgcaatttctttctcgtcatctactactaaaatccgtgcctccacagttcttccccctatgcttatctaaatgttttatgtcctgagctattatagcaaaatttactttattttctattaacgatttatacagaaatgcttaagatttgcttaatctttctttccatattttttagggactctccacactttattcaagaaaccatcacagatatttcacatttatcctttatagttataagtgttaagaggccaacaacctaacgcaaaactttttctttttcataagccagtatccacagggtactggctctccttcttttatatagcaaatgggggcggatatgtgtaacttccgcccccatcgccgtattcccgtgcacaagtgtccggcaccccgggctcttctctttaaaaacgtccggatgcgcctcctccccccgaggaaccgcctcctcctgaggaacctccgccgcctccgaagcctcctcctccgaaaccgcctccaaagccccctccgaagcctccgaaaccgccgccgatataaggaccgcggaaacctccgcctcttctgccgcctctgcggttattgttgtttagaagaatcaggataatcactaccagaataatccacaggatgtctcctgtcttagaatcatcgctgctctccccgctgtctgcgtcttcttcggggagaaggctttccgtgtcaagctctgagggcggctgcagtccatattcctcatagacagcctccattacccccgtatacatcatttttattcctgtattccagtcgtcctcttttaaatacggagttccctggctgcgtattatccggccggccttagcatcattgatggctccctccaggccataccccacttcaatccgtacctcacggtcctggattgccacaaggatcagaaccccgttattctctttctcatcaccaattccatactgccggaacatagtattcgcataatcctcaatcgtgtttccgtccagactttctacaatggagacaactacctgggcctttgtctcctcagccagagctttgcttcgctgtaccacataggtttctgtttcttcactgagtacatccgcaaaatcattgacatagaattcactggtctgccggggaatctcaggtgcgccaaaaacctgtacggcctgtacagtcaacaggcagaccagaaacactggcagccatagtatttttctcttttttttcatattctcccctgttccctgtctttactcgttaaaattcacttccggaacactttcagcaccttccgcagcctggaaatactctgctttctcaaatccgaaaataccggcaaacagattggacggaaaccggcggattctctggttgtaagtctttaccgcatcattgtaatcttttctggctaccgcaatcctgttttcagtccccgccaattcatcggacaaagactggaactgctcgctggatttcagatccggataattttctactaccacaagcagacggctgagggcactggaaagctcaccgtctgctgccgccttctcttccattccctgtgcccctgacagctttgccctggcatcgctgacggctgtgatgacttcctcttcctgttttgcgtatccttttacagtgttcaccagattaggaatcaaatcaactcttctttgcagcatcgtgtcaatattggcctgctggttctccacatcctcccggatccctaccatggagttatactggcttacacaaagtcccccgatcacaatcacaccgactatgatccccagcagtactatcttacctgtttttttcacaatgaatcctcctcttctttccctacttggggtaccgttttcccgtaaatgatgacacggttaccttaataactgaaatgatagagaccagtctctcattaaaatcaaactcttttcctgagatacatttcatcaatatcttcatagcctctatcttctccccgggatcttcgataatttgggccgtgccgtgtcctacgatactggcgtatttgtaaccgtactggcagggaactttcccctctaccagctgatgatcacagtccagttccacgcccacccggctgtatctgcgaaggacatccagtttctttccttctactgctccgtgaagataaaaaacaagttctccgttctcataagtatacccataattcatgggaagaatgtaaatctccccgtcatcgtacattccaagacgcaaaacttcacatcggtcgataatatctatcatatcctgtacatcttcaatttccctgtcccttctcacctactgtatcctcctttatcatttgtcttcaaacggtatgccattattttaacacagcagcttctatttttcctccaatttcaaaaatttttcgatatatttaataaaaggaagcccatgtaccggcagatcgcgccggcacatgggcctccttttttcatccttacaaaccgaattaggttggaatactggaaaaacagctggggttgacaacctccagacttccgttctcggcagtgacatccagaagaagctgtccctttctccagaaacgatatcgaatctcacaggataaagcttcctgtattttcccggacatcctcccttttaccggtgagcgcaggctctgtccgcctttccacggatactggacccacagaagatctcttccctggcagatcataaattccccggaattccaccggaagattcttgccccgagataagaggccagccggtactgtctgcctccgtagtacacgatggcaatgcaccctgagaatttccatctgcccacaggtaccttcgccacagcagccgtaaaagccatatgccctttgtcaaagacactgcactgtgtccacacataaccctcaggaaatgaagttccccaatccttttcaatatatccgcacccgccgttaaaattataccgctcaccattaatcataagacttccatgtatcttatggctcagactcagaataccgtgattgcattccatggtaaaataagacagagggcccataatatcccgggaagggggcgtcaggcttccatatctcaaaaccccctgtatttcggccgcctcactctttaggtttacccggattcctttttcacaaaatacattctcaccgatctggcagtaaaatcttttcctgtccccataatactggctgggcaaaaatcggaattcccatgcgttctcttccgtgattacctgaatgagaatgcttatccttccgtctttttctacatggtacgagggaataaagctgagcgttttattccccttctggtgtttcagataccatccctcaaaatactctctcttgtcttttcctcccataaatgcgccgaatctgcgccctcttctactggtcatcctgcattcctccgatatcattctgtgccgggttatcgataagtttccccttatagctgaatctggaaccatgacaggggcagtcccagctcttctcctgagcgttccattccagctggcagccaagatgaggacagcgtactgacactgtaaatacttttccgtcttctctcttatatacacctaccttctgcccctgcatatctacaataccgccttcccctattgtaagattttccaggacgtgatcaggcaccgcaaaggcccgcttgagcagaccggcggctgcctttgtgccgtctactgccatatgcttcgccgtagaaagtgtgattcctctctggggggaaaacacttcttcccatgggtttggcacctttcgaatcaaatcactgattaacatagctgcgaccatggacgaagacatcccccatttgctgaatccggtggcgacataccagtagggacggcgggcggaatacctgcctatataaggaatctgatcgggtgacatacagtcctgtgccgaccacatggcctccgtcctgcactgaggccaccagagcgccgccttgtctctcagctttctaagagaagcgtctgtaagattttctccggttctgtggccctctcctcctagaatcagaaactccccgctgttgcgaaaggaataatcccacttggcatccgtgcccagatacatcccgtccatacaggcggcaccggagaatgccacggcatagcttctctcctgatgcatccgcataaaataatatcccggacggtttataaatggataatgagttgcaaagataacgtgttctgcctccaccaccgggcctgcctcagtaatcaccctgtgctcctctacacggagcactctggttttttcgtatatctctatatcacgggcaatcccctctaaaaacagaagtggatgaaactgagcctgggcgggatagcggattgccccctcaacaggaaagggcaacgaggtaattgttgtaaattcccctgcacagcccaaatgatttactgcctctacctctttttctatcttttctctgtctgacacagagtataaaaatgaaggcacccgctcaaacatacactctatattgtgttccgttattatctgttcgtattttaatattgcctcccaattggcccccagatacaggcccgctgcttccctgccaatcttctggattagcttatcatacaaaaggttatgtgagagcgctatttttgctgtggtattttttgtctgcccccatccgatccggtctgcctccaaaagaatcactgagactcctctgtgttttaagagataagcagtcaagatacctgccattcctccgcctatcaccacggcttccgtgtttttgtcagaagtaagggactgaaagttcgggagttcctccctgcgcatccaaatagattccatgatttcacctcttctttaaagtgcgcggactgcggatgttttatactgaaaattgacacttccttcagaattttgtatgattactttgtaactagaaaggagaaaaacataaatgtctaattctatttatcacatagcaatatgtgacgatgatcccattttcctggagaatatagaacagcttacaaaatcaattctttctgaaaaaaatctgccctgcggggtcacgtgctttcacgacagcatccattttttagatgaagtcatgggaaatccaaaaaactatcagcttattcttcttgacatattgatgaggaatttggatggaataaaaacagcagaaaggatccgccaggaaaaactggatattcctattgtatttatatcctccactgcagattttgccctacagggatatgaggtacaggctcatcggtatctcataaaacctataaataaggaaaagctgcaggatgccattctgagcagtcttagattaaagaatgaagaaaagatgatcctgctgaaatccggaaccacctacaaaaaagtagccttctcagatattccgtatcttgaaattaaaggtcatgtattaaaggtgtatctgcaaaattcttctgtcattcctgtatctattaaaatgtctgaggccgaatcccgcttccctcagaactatttttacagatgtcaccaaagttatatggtaaaccttgcttttatagaaaatatatcccgctatcagataacccttattgacggcaccattatccctgttagcaaatcccgttatatagagactcgtcaaaggctgctggactttctgtccatatagcggtttcgtaaaaatcatgtcaggagatacctatggaaaagaaaaaaattcacttattacataagattcacaataaattattatttatggggattcttgccttcaccgttattatggcagttatctcctgtcatctgctttttatatatctgtttcctctctcaggggaatataaaaatatctcggtaatggagccaggaaatgaacaggaatgggaactttatactaacgagcagggtacaataaaatcacttagcactgcagacggttactcttatacgggtcttgactatgaaggccaaacatactatatgtccagaaaaatccaggagaattacagcgatattatactggaaattgatgctgtcacaagtcaaatctccattttcctggacaaggatcttctgtatacagacaacagtgcagcagataatcgtatcggatatgtggctctctcccatcttcccaaagagcgccccaatgggctcaggctgtccctgcctcctgattgtctgggaaagacactaaccatagctgcctgccagccctttgcagaggcttccggggatcttatgaccatttacccctgtaacgtttctgtgtacagtacttacgccttagaaagcctaaacgtttccagtgcaactaaaactgcctatcccgccattctgctggctatcctgggcttttttttgctaagtttgtttttatatcagtgttttcacagggaagcagactggggtctcttttttctggctttcttttgtctgctctggatggctgatgttatctttcgttctccctactttggaatttatttcgggtataaactggactttgcagaaatctatcttcgttatggcagtgtcagtttcctgatgctctttctttttattcgtatgaacagatgcaggaaaatctatctgccttttgttgttttacagctgatatctctgatatgtctgtacctgactaataatacgacgattgtctttgagtatcctctgtacggtgtgctcctgaatcttccagaatatgcaggacttacaggacttttggtcatttttatttttatgattccagaactaaaaaaggggaatggattttaccgcatgctgggaatttttactgtcgctgccctggcggcagtgcccgttggcgcaatcctttatgctttacagtttataagaagctctgcagagatgaataactggatcacacaatatcttcaaagttataccacagaaatacgaggcccctactactacatgctgattgtcagttgttttctttccttttccagttttattatcagcctctatcgttttattctgggagttgttcgtaaatatacttccatagagttacttcgtttaaaaaacgaactggcacaggaaagctatcgccaattgaaccaatatacggagcaggttatgatgctgcgtcatgatgaaaaaaagcacttctcactcctggccaccctgctggagaagaacgatagcgaaaaggcgctggagtatacttatgaaatcattcagcgggctgacgatgtgacacctatagtcaacacacaaaactacatgattaatacgattgtcaacagcaagctgtcttctgcaatgaaagagggaatccagataaccatacgtcatgcatcggtcccagagaagctgaatatcgccgattcggatctctgttctctgctcatgaatgttttggacaacgcacttgccgccacaagtcttcttgaggaaaaagatcgctatattacccttaatctctatgtcaaaaacaatttcttgtgtatttactgtgaaaatggtatagctgacaaaaccgaatgcaaagaggaaaaggacgtagagggcattaaagctcatggttacggtttaattattctggaaaaaatcgtagatcgttataaaggaattctggatattaagcaggtaaatcaagccttcatcgtgaatattgctttgcctgtataatttagaataacaaataacatccgccgcttcacaggatatatcacctgcaaagcggcggatgtgccgtttgaatgctttaattttccgtgagaaccctgggtgtgccataatgataaacctctttttttgccctgaaaaaataaacagaaacaaatatcgtcatcccttcagccagagggactgcaaaccacacgccgtcaacaccgatcagatacggaagtaataatacactggctacgatgaacacaaaggtccttaaaaaggatatcgcagctgaaacctttccattggaaaatgccgtgaacatagcggacgcaaaaatattgattccggcaaatacatagttaaaggaaaataagaagaaccctcttcttgcaatctcatagattgcagagcttttgggtgtgaagatctctacaattatagaagatccggctaatgcaaagatgcagatcagcacggaggagatcccgataaagctaatgcatattttatagattcgcttcagcagcttctcattcttgctcccataattaaagctgaagacaggagccaccccaatggagaagcccaggtacagggcattaaacagaaactggccgtataatacaatggtaatagcggctaccccttcttctcccagaagtctcagcataataatattaaacaggaacgtaacaatagcggttgacagattcgtcaccatctccgaggaaccgttcaaacagctgtcccccagtaccttccagtcaagtctgggacggataaagtgcagatcatggttccgggaagcaaagtagataagacccgaaaccgccgggataagctgtccgaagccggttgccagcgccgctcctgcgatccccatctgcagaggccccatcagtatatagtccaggacagcattggtaattcctcctgccacagtgaccgccagacctatccccgggcggccggcagttacaaaaaagctctggaacagcagctgaagcatacaggcaggtgcaaagaacagcagaatactcagatatgtaatacagtattccataatcctctccgttgcccccattgccgttaccaggggatggatgaatagatttcccgccgccaatgccgtgactccaaagagaacccccaccgtaacaatcatggtaaaattttcttttgcctccttctctttcctttcccctatctttttagcaatgatagcgcttcctccggttgccagcataactcctgcggcaatcagaatatttaccgccggatatataatattagctgcagacagcgcatcactgcctaccagtctggatataaataccccgtcaataattgtgtacaaagacatgaataccatcattgccatagagggcagcgcaaactttagtaatgtaaaaaatttaaagtcctgtccgattgattttgtcataatatcacctcattttcttgcattttgcgcccttattagatatgatatggtatagggtaacccgatagtcaagaggaaaaaatcatgaatcagaaagaaatgtatttaaccaccggagagtttgccaggcttaccggggtgaccaaacacaccttatttcactatgatgagattggcctgttttctcctgcggtgaagggagataacaattacagatactataccgtatctcagctggatgtgtttgatgtcatctggacactaaaagaactggatatgccgttaaaagagatcaaatcttatctggaacataaaagtcccggagctctgcttcaattactggaaaaggaagaggccattattgacgggaaactgtcccagctgaaaaaaacgaaaaagtggctccgccgcaaaagacagttcatcaccgacgcgctggcgcaggattacactaagattcaggaaaaagaatgcaatgcccaatattatatagcctcccatgcagatgccgcagatgatttttccctggctctgaaaatcggagaacttatcgattactgtgaaaagctggggttcaagagtactcacaatatcggatacctccacagcagggctcagatagaaaagggaatctatgacgattaccggaatatttatctgatcctggatgctccgccatccaaaatcagataccggctaaaaccggggggaagatacctttttgtgtatcacaaagggcattggaaaaccattggggactcttatgaccggctcttttcctatgcacgggaaaataagttaacgcttggggatttcttttatgaagacagtctatttgacgagcttaccatgtatggatatgaaaattatatcactcagatatcggtacagctcctatagactgcttatggccgggaatccccaggtccttctttctcctcccccctttggtgactgaattcatactcctcctcttcatttttaatttcccagttaataagaactgccagtatggtcctaagaataatgattgcgccaaccataataatctcagacatatccctgataataaccgtgcgcagaatctctcctcccagcttgaattccagtcccatggaaagtccttttgccaggatcagcctggtattgggttttctgcgtatgtaatttacaatcccctggaggcctgaaaaggtaatgacacccactccgatgcactcgaaaatcagaattgctgcccgcgttaccagaatcagtatatcttctaaatattccataggcacctccctcaacgattttttatatccagccagcgaatggtgtctgtcactgtatcatacagatctctcggaatgtaccccagttcactggtggctttatcatgagaaaacctgtcgttgctggtcagagtatacagagaatagctggtatataaggggcgtttttttctgcatcgggcgtagaatcctattaaaggtaccgacgcccttgccacccataccggcagcaccgggaggcagcgtcctccctgaatctgccgtatcattttaataacttcacggatctcataatggcggttagacaaaatgtagcattccccgcatgttccctgttctgccgctgcgagacatccttccgctacgtcacggacatctacaaaatcataaccgccctttactcctgcgggaaggcttcctttcatataatcgtatataaactggacaacatagttcccctttttgtcataaggcccaagtatcccagagggatgcaccaccacggcatttgtacctcgtccggcgcttctgagcacctccctggtggcctgtgccttagtcttggcatatccgcccgctaccaaatcaggggaaaattgttttgcttctcttatcacatgcagcctgtccccctccggaatggcatgtacagaacttacatagaccagcctgtcaaccttatactttctgcaggctgccaagattgttctcgttcccagcacattgacttcgtacatccttctggttaatttccctgagatatctacgatccctgccgtatgcagcaaaatgatactggatcccttcgttcccgcaaacaggggttccaattcctgcagatgccgcacatcaccgcagacgtaatccactcctttcagaaggttctctttttcccctggaagtataagcccccttacattctcgtgccttttttggagcagtctgattaaagtactgcccagatggccattggccccggtaaccagataaattcttctcttcatcacctgtacacctccccgaacactgtacgctgtataaacacttttatattatctattataatgtaagaattcagggtgtacaacattattttatctcacgtttcttcctattgctcctggttttcaatatagtccttcaggaaatcatatacctggttttccgtaggcggacagccatttaggtaacatttgaatcccctggtacaatttccgatccccagcagcccctttttgcctttataaccctgtccaatggagatcttcgtatgcagctgtttcagaagcccttcttcttttaatctgtccagggccggtataaggtatccgtaacaggcactgcaggagtccacctcctccactgcgtcctgaagctctacaatttttcttggagaagatatcttctgcagttcttcctcctggccgcaaaaacggatcacagcctttgtaagatcacagcagccaactcccagctcagccgccagtttaatatacggcacatcggatatgtcatactgtaaaagactgcacacataggcatcacagagtaccggatctgcagctgtgagaatgcggttcataactaccggatttccaccatcctcaaaatccaaatccccgcagatattatccactacaatgaaatcctgccggattcccgcattcagatgggcaataggcttgtgtagccccatggtatggaagcgcctcttttctttgttcggtatcaggcccttcatgttcttcagggcacaggttatctttgtctggcagtggccttttagaaccggtacattaattagaaaatccagggcggaaacactgtcgcagatctcaagattcatccctgcgcagctgcagcttttgtgtccgtccttctgggtatctgtaaattctacctggtattcagaaaacagcctgtcgtaaccgcatgcctctacagtatcccaggttttatcccctacccaggatccttccagaaccacaagatttctatagccccgctcctgcaggtattcgatgatgcctgctacaatctccgggtgagtggtagctccccaggaaggtgcagaaggagataccagattgggctttatcccgatacggaagtttttgtccggtatacgggcttcaagatccgattcctccagaatacgttttgtcatctctttataatcttctccgctgataatcacgatttcattatttctcattctctcatctcctcgtataatgatcactttcaaagtattggcgttctacagatatataatcaggattcccaccatcatacccacaattacggagaatgccggggatttgctgcggtacataagaatagcctggggcagaatctccccgaatacaacatagagcatggcaccgctggcaaaacaaagacttaaagcaagccccagagggccgatgtcacccagccagaaaccaagcagagctcctattatagtaggggccccgctcaatgccgtcactgctatggctcttcccctgctcattccgccgcttatgaggggcactgccactgccattccctccggtatgttgtgcagcccgatgagaactgccagtaccagagcagagcccgtaaaaagactcttggaatttgcaaaggatgcccctatggtcattccctccggcagattatgcagcgctatggcgcaggccataaccgccccggcaataaacagagatgctctggaatctttattccttctgtgagtctcaaggtgatcgctgtgaattaactccttcaggtcgtctgccgtgcggggatgatccgcatctatgtgaggcacctcagagttggtacgtttgtcaatgatataattcaaaagagacaccagggctattcctataagaaccccggcaataatgatacctatattggtcttagtgttgattgcacttattaataaatcaaagcacacgatgctcagcatgactccccctgcaaagcttaacaaaagactcacggttttcgtagagtcctttttaaacagacctcctataatcccgcccaatccggttcctccgactcccgcggccgctgtaataagtatcacactttctaatgcactcatactctttatctctccctgtctccttatattggctcatagcttgttttaaacagtatctattttacaccattttatactgcttgtccgccaaaatttgacattatttttaatgtatagaggggacacctatctgagcggcttgacatcccccgcggctgcatttatcatctaagtagcattgcatacataaacattcagaaagcaggaatctatatgaatcttttatctatcggaaggtccggtatccggacaccttatatttcaatgggcacctgggctatcgggggaggcacctggtggggagaaaatgatgacgcggtctcagtgagaaccatagaagaagctgttgctctgggtatccgatggtttgataccgcaccggtttatgggatcggtcacagtgaggaggttcttgggaaggcactgagaggtaggcgcagtgaagttattttgtcaaccaaatgcggcctggagtgggactatgagaccccctgcttccataaagtaatggagggcaaaaatgtgtaccgcgatctctccccccagggaatccgaaaaagtcttgaaaacagtctactcagacttggaagcgattatattgatatactgtacacccactggcagaccccggatcctgctctctatcctctggaagaaactgtagagacactcatgtccttgaaaaaggaagggaagattcgggcggtgggagcatctaatgtaactccggagatcatacgaagctactgccgatacggacaactggatgtgattcaggaaaaatacagtatccttgatccccatatcgccagggacctggttcccgtatgccgggaacttggggtctcggtccaggcctattctccgctggaacaaggactgctgacagggaaagtaactgctgacactatcctttccccggaagatatcagaaacaagaaccattactggcagcaggaaaacaggaagcatgtcctccgccttttggatgactggaaacctctgacagaaaaatacagctgttctctggcgaatctcatcatctgttttacagcggcatccatgaaagaactcaacattctctgcggtgcccgcaggccggagcaaatacgtgacaatgcaaaagcgctcacgcttgagatagagcctgcagatctgctttccatgcaaaaacaggcaaacgccctccaatccatactcattcagggaggctcagatcatgattgattttaaaaaggcacatcaggcatttgaaacttatctggacagctacaatcggaaggatgataagatccggcttaaaatcatccacacctacggagttatgacatacagcgaagaaatttcccgccgcatgaagctctccagccaggataccgatctggcaaaaatcatagcccttctccacgatattggcaggtttgaacagctaaaacgctttgacagcttccagccagataccatggaccacgcagcctacggagtacagatactatttgaggaaggcatgatccggcagtttatagaggatccgtcctgggattccgtaatccgtacagccatcgctctccacagtgattatattctgagaagcatacctcatccccagactcagcttcacgcgaagctgataagagatgccgacaagctggataactgccgggtcaaattagaagagcccatagagacactgctgggcatatccccaaaagagcttggacgttcccagataagtcctcacattgcagaggcattctttcacaaccaatgcatagaatcctcccagagaatcacacctatggactactgggtatcctatatcgcttacttttatgatataaactttcaggcaagccgggatatcatccatgagcagaactacatctcccgtataatacacagaattacgtatgaaaacccagagaccaaaacacacatggagcaaatggaagtacatctaaaaagatactttggagattttgggacgtgttctttctagaaagaacacgtcccaaaataggcaaggggtgtccccttttacaactgccctgtcccctgtttctctttttctgatatattaactaaactgcttttatttatcatctgtgcaaataaaaaagcaacacctccgggctgcaaggtgttacttttttatttgccgttatttggttgttcttctccttttatagatgattgcaccaccaactgttccggacaataagagagctaacattgcactgctaattggtgtattatctgctgtctttgcgcctttcgtcttggaggttgttgattttttcgcattgcttttcttaggagaagcaggtgatttttttgttatcttgaatgttttctttatcgttcccgtatagttgcccttgaatttaatttctacggttcctgttcccacggatgtgtttttaccgtattccagatcataatctgtgccttttttaagctctttatcaccaagcttaacggtaggtctaggtctgatttgtttgccagtcgaagtagtataagatgaagagatacctgtgatttttacatcatcagcagttagtttcattggatcaacggtaatgtctagtgaagctgacgctgatttatagttcgcatcttcttccttcgttaccttaaccgttgcttcgcctgcagcttcaatcgtaacttttcctttctcatccactgagataacgtctttgccctcttctacactaaatgtcagcttaccatttcctttagcccctgacacattaagctcgaatggagcatcgccgaagactttatcctttacttcctcaatggaaagagtttgttccagctttttcggtgtaacctcaatcacagcatcttcggcagcaccgctgtagtttgaatcagcatctggctggtattcggccttaaatgacagcttctggcctactgcgtccaccttatatagatatgttgccttcccattattaagggctacaacattattctccagcaattttgtcccctgagaaaacttaattgcaccggtaggcgtatttccggttccgttcggtgcggcagtaactgtcagctcaattgccaaaccaccattatccacagctttcgcttctatactcagtttagttttagcttttacaatctcgatttccccagaatttactgttacattatatttaggattagatgccactcctttaatctcaatatttttaccaacagcagccccaggagcctgtgctttagattcgtaggtcaaacctaagtcatctccgtcaataattgtcccagatgttacgtcatatggattatttagagaaaaagtatctccatatgtcatttttagatcctttttaatctcaattgttacttttctgggcttcaccggtactgttacacttacatcgcctgcctcatatgctcccggatcatttggcgtaaatgtagcttcatatgtaatatctcctacatcacttaacaccgttgaaggatctttccaagcataagtccccttgtcaccagaaaggctaaacttctctaacttatctccatattcagcctctccggatactttaggtgcaggtattgaatttttaattactttagccgtcttatcgcttttaatattaccggtaaagccagctgtacctgataccgttacctgtaaggtattacccacatctgcatttgtaattgtatacgtactggcagtagcccctgcaatatctacaggctgcttcccatcctcgcatctctgccactgatagccaaggccctgtacagcattagaaggattcactttacttacatcagcagttaatgtctgtcccactgccgcagtgccagtgacagcaactgttcctagaatattgtttactatctccactttatcgttcttcaccagattactgttaccggttttcttaacgactgcacccaaagggttcccggcatccaagccttttgcagtgccgtccagcactaaggtgcccgtcattccctgcttgcccaaggtaagcacagcgttctcagccgtaacatcaaacatatctccggcaaatttatccactctggagattgtcacttttgggacatctttgggaacaatagaaatcttctggccttttttcaagactaatgtcttgttaatggtctgatccgctttcaaatcaatctgtgccgtcgccccgtttaacgcattcaatgccgcttccaaggacgcatacccagtgttttcaataaaaaccgtatctgctgtctttggggttccgggtgtctctgttcctgtgctgctggccataactgtaacgcccagatcgcttcccaccgtggttcccaccagcaatccggcaagcagaaagctcaggactctcttcctataccctttctttgccattttattacctcctttgtcttcaacgaaaatcttcaccctctatgcaggcagactcctacattgtttaaattatactaaaaaagcctgacatttacaatagaattggaaaaaacaggagattattaagatttttttaagaacccatggcacaattatacatccagaccttcaaagaactcgtcgtagctgcatttatacagcttatgaagcgcaaccaacagctgaatcggtacattcagttcaccggtttcatatctggagtatttacttcttgttatgcggataccaaagttagtatccagctgtgcgatcagcatatcctgagtgagattgctgcgctttctcagcatgcgtaaattatttcctatgttcatttccccacttttaagtttctgcataatacccgccttttcgctcactatattgagcatatagtaaagtatatgttatgctgtaagcaaataggctcaaaatattgagcagaaggaggcaatcatgaaatttactgaaaaattaagaatcatcatcgaaggaaaaatcattgaaagcagattaaagcctgacgaggcagacaataggaaacccccggaggagttataccaaaggatagttgaagaactaaaacagaaaggaatctatcgggaagaggaatcggaagattagatgatagaaaaataagccactgcagcaggtggaaaaagcaggagacttgacactatttctcgtgccaaatctcctgctcttgaaacaaatcttctacaatagattcatatgctgacagtttttcacattttcttatcttctttacatactttccactgttcgtaaaattggttcccatataggaccacagctctttcatcttaaaaagtacggttttttctccaaagagaacctcttgatattcccgataaaccgcatcatgaaattctctgtaacgctgtttatctggcagctctccgttcttgacacggcatatcagaccgggatctgatagtattcccctgccaagcatcacagtatccgtctctggaaactgacggataaagtctacaaaatcatccgtcgtaaaaagatctccgttataacataccggatttctacttagcttcaaagcatcagaaaacacttgaagattggggtgatttttgtaataatctctctggatcctcggatgtataatcagctcttttaaggggtatttgttatatatttcaataagtctgtaaaactctcccgggtcatcccttccaattctggtttttatggaaatggatagatccaaattagaaaaaacatcctccagaaactgatccagttctttaggacaagctaaaaacccggaccccctgtttttagaaactacggttctggaaggacagcccaggttcagattcacttctttatagcccaggccttttaaatcctttgctgcccgaataaagtcttcctgcctgttggtcagtatctggggaaccagcaacatcccctcattatgtcccggaagtatatcgtttaattctttggcgttaaaactccggttctgattaggcgctataaaaggggaaaaatatttatctatccccccaaaatacgtgtgataggccgtcctgtaaatgtagccggtaattccctccataggtgcaaaataaaacttcaagtcagttattctccttgttacaattcatttttttccagtttagccatcttttcctctgaaaccagcagtatttttactgccgcccttccctcttctatcaaatgaggctccattaaaagaacggccgccgctctgctttttccgtcccgaatctcatactcaacagtctcaaatataagatcctctcccacctctgtgatactggcatcctgtcccattcgaaaggtaactgtaaaaaccgggactgatccctccatatttttcttatgtatgactgctttgtccagtacctctttctcaaaggcatatcctctgatgctgtcggccagatcatggagctttacatatcctgtataataataatttccttcctgtcttgcatcctgtactcttactctcatataaatctcctttcggaacctaatttagcagaacaaggtgggctaacccactacagctccccgaagggtttataaaaagtatatcatacttccgctgctgcgtacaccgttaccagatatctcagaaaatcattgtaactttgcctctttacacaaactgataataaactctcctgccgtgacagcatcctctactgtcaaataatgatctgcattcttttgtaccaaaagccttgccgacgcagggaattcttcatctccaaaccatagattcaacattatgggatagcgtggaagaaatggaaatactgcacacaggtccgccctggattctacgatttcagccccaagaagccggcagatatcctctgcctttccctgggacaattcgccgaaaaggtttcccagctgttcatttactgtatgagcgaattttgtacctctgattaacccgtctttcaattccccaaatgatatccattgcggggagacaggcattccatcagcaaggctcagataatgcagcaccagcaggtggtgccagtgattcagtttttgtctgatttcaaacccgggcagctctatatctatcatctgtgagagactttttactctgaaagaagaagtctctttcacatattcagctccggctttccctgctatatcctccggactgcggctcaccagagattcccgcgcatgttttagcatctcatagaatgcacggtctgcagacagtgtcgtatccccgcaggaaattcttttattatccatatcagtattcttcctcttctataaatttcatcaggtgtactccatccggaataaaatatccgcattgtgtgcagctgctttcccccacagtcaggccatccttttcaaatatttctataccgtttgccttctcacaggaaggacagtctatttcctttatacgaatcatatttctcgcatccatacagccagcaaatacgctcataactctgcctccataatttcaaacgcatcccctaaagtttaagtttatctataattccggccagagcattgcgtacctgtgagtctttaggaagctggaccgttggccttccgtcgcagtcaaagcggtagaccatgtcgtcatggggaacgacccccaataattccagattctgactgcggatctcttccattgttccttcatccagctttccgtccggcgcccggtttataatcagtcccgtctgctttggcttaaaattcagttccgccatcaagcctgctattcggccggctgcctgtacccctcttctggagcagtcacttaccagaatcgccgtttccatcgtggggaggagtcctctgctgatatgttccatcccagcctcattgtccactacaacgaaaggataatggctctgcagtttctgaatctgcgtctgtaccaaaccatttacaaagcaataacatccctgtccctgggtgcgccccatcaccatcagatcatagtcatcctcttccgttatggcatccccaagtctcatctccagatatgcctgttttgtaattcctgcaggtatctggtaacggctgtctacccctgctctttccagctcctctctcagttctcctaacgtcacttctgtctccacacccagaacttcattcagattagaattggcgtcagcatccactgccagtaccggtccccgtccgctttcacataaatattgaatcagcaggccgcataaggttgtctttcccacaccgccttttcctgccactgctattacatgtcccacactcttacctccatctttttataatttatgaacaatgtgttgattatttctatattaatgattataatatttgataataaaaagacaagaaacaatatttgggatctgtacggttcctgaacatatctgtgatattgttgatttacgaggaggttttatgtcagttgatacacgaaaagaagaccgtcggacaaaatatacccgacaagtaatgaagcaaacactgttcaaactcctggaaaaaaagtccttttctaagattaccgttacggagctgtgcagacaggcagagatcaatcggggaaccttttatcttcattattatgatatggatgatgtactggatgatatcttaactgaaatgatagagaaaaccgcgaatatcattgatcatgtgctatgtccgcggcagctcacttccaaatgctcctatcccttctgtgacctgatacattctaatgagcaatacagggttttgttttccgacgattcaattacgccaagaatcatagacaaaatagcagatttaaataaagaagactatgtaacctggctgatgtcacatagccttcttacctttgaagaagcagaagccatcttctattttcagatgaacgggtgtctgaccattaacaaattgaccctgcacaacaaatgcaatgactggcagaagatacagaaaacgattgactcttttatcaaagcgggcatcgaaagttttctgattcatgatcagagagatgaactaacaggatcctcctaaccttcataaagcaatcagaaacatctcttattcttctcctcccaccgccggcagtatctcagcatacttttcagattatctatactgatcggctttgccagatgatcactcataccggccatctttgctttttttacatcctcggaaaaggcatccgccgtgagggcaataatgggcagctcctggatggcttccttgccggaagatcttatctgtctggccgcctcgtagccgtccatcaccggcatctggatatccataaacacaaggtcataataaaaggggggattccccaatactttgtcaaccgcctgctgtccgtccgacgcaatatccacctgcacccccagaagttcaagcatctccgatgcaatctgctggttcatctcattgtcctctgccaggaggatacgcatgccctcaaaattttcataagcatcctctgccgatgaggtatacttcttcccgggctccatacacttttccatagaaaaggtgagagtaaaccgactgcccttaccatattcactctctacttttatatccccgcccatcatctgcacaatattctgtacaatagtcattcccagacctgttcctggtattttcctatttctggtatcatcggcacggctgaagggttcaaatatatgctccagaaattcttttttcattcccatgccggtgtcctctatcacaaaccggtaaatgcctatgtggtcttcttcttcccccagttcttccgcaaagatacggacagttcccttcatctgcgtatatttggacgcgttttccaggatattcaccagaacctgggaaagcctctgcttgtctgtgaggacttttctgtgcatatcttctgaaagcgatacctccagttcctgtcttttttcactgactccaggctgcacaagcagtactacttcctgcatcagttcccccagatctgtctctgattctgacagttcgactttgccgctttcgatcttgttcatgtccagcacttcattgatgagtcctaggaggtgagcgccggaaacctctatcttatttaaataatctaagagctttccctcttccccaatgtgaagctttgccagagctgtcatccccataatagcgttcataggagtccggatatcatggctcatcctggagagaaaatcactttttgccctgctggccgcctctgctttttccagcgcatcctttaacagtacagtggccatacgttcctttttcagattttcttcctgctgctgccgttcttcgtctatatcctttgacatggtaatctgaagcacatcatccgaatccggattcgcaaccctcactgcctgggtagagttccagtgatactttccgtcatcccccatctgacgcatttccatcgtaacctttttctcccccctggaaaaagcctccagaagagctttccgggaaaacttttcttcaaactcccggcggtaatcgggatccagcgtagaaatgcccacttctatcaggttgtcaaaacatccggactcctgtgcctttttagtgggaaacctgtcgtactccagcatctggtaggtattttgtgtaagatttaccgctatcagcatctggtaagcaactctggctgctgtggccagctggctcatgtccagatccctcttccgctccagcagatattcctcgttgacatcccggaataccagtacacaccagtactcatcccccagctccaatgttctggttgctgtaaattcaaccatgtgataagtaccgtctcccatctttcgccgcagccgctttgcaatctggtttttcccgcttttaaaaatccggagcatagattccctggaaaagtgtgcgtcaaagcagtccacatcatccggatgtatggtccggcgggaatattctctattctctgccccaaaatttcctctctccggaatatctgtccacatcacgtccttctgacaatttacataaaaatccttggtgaggttcgcaatgatgcattcgttaaatacagtaaccaggctcttggaatatattttctcaatctgccgcagtccctgttcctcctcatagttaagcttatggggagtgataataatcacaaatgccggaatcctgccgttccacatcatccggttcgctatgatatccactactttaccaaaggggtcattataatggatggaatggctggtttccctgtctccaatagtgagcagaggacaatctgaacaggtaccttcccacagctcatggcacttcacccccagctgtacatctggggtaacatctttaattctccggttaaaataaagcagtctgtgtgtattctgttctatgacatatacgccagtctcttccaatgagtcaagcattgctcttatattccaatcctccatgtggccgcctcctgctccgcttctaagccatacactactattatctagtcaaattatactataaaacgaactttttatcactagaattccttgtataaaccaatagaaatataccgtatatgaaaaacagcagcactgcccttttctccacaaatccggaccgtactgctgcatgcctgttatctgattttttttatatagaagcggaagctctcatactctgtcttagcttttggaaggggaatccccccctccataagtactcccccggggtattccctgtgattcaccaggtatatgctgttttcctccagccctttcaatttcatcaatacagacggaccgttgggatgaatctttagcgtcaccacacacaacagagcctcgcttttatcttctgcggcgaattcccaggcatgatacccgtcattgtattccgggtccgtcaagcggaaataacacccttcctgaatcagtggataatagctccgatactcctccacctgccggcggacagcctgcttttcttcccctgtcatctgattcacatccagttcatagccaaaagttcccgccatagctaccgtggctctcgtctccaggggcgtatttctccctgtctgttcattgggacacctggatacatgagaacccactgcacttattgggtagccgaaggaagtaccgtactgaatggtcagacgttcgatagcgtccgtatcatcgctgcaccagctttggggcgcgtaatagagcatccctgcatcgaaacgtcccccgcctccgctgcatccttccagaaggagatccggatatctgtccgtaagccgctccagaacctcatacagacccaggatataacggtgggccacctccccttgcttctccgggggaagtacggcgctgtaaatatcacagaggcttcgattaaagtcccattttacatattcaatcctggcattgtccaaaatactgcagagccggccgaatatataatttctcacatcctgcctggaaaaatcaagaaccagctggtatcggcttcggaccggtgcttttcccggaatacgaagcgcccaatccggatgtgcccggtacaaatcactgtcctctgatacgcattccggctcaaaccagataccgaacttcatccccagcctgtgaatcctctgtgagagttctgagagcgtgcatcccagtttctcttcgtttactgtccagtcacccagtccggaagtatctgtatcccttttgccaaaccatccgtcgtccagcacaaaaagttctatccccattgatgcggcctcttttgccatggcaaacaatttttcccctgtaaaatcaaaataaaccccttcccagctgttaagcatcaccggtcttctgactgttttatattttccccggcagagattctttcgataggcccgatggtaaatctgggacagattccccagaccctcttgggcataagccattgccgtctccggtgcccaaaaggattccccgggttttagacggtatctgaaattgccgggatgaatgccaagtacagctcttgtctgatcatactgatccagttccacctctcccagaaagtccccgctgtacaaaagagaaaacccatagcacgctccatgttcttctcctgctgttttctcacagagaatatagaaggggttctgctgatggctggatgttcctctggtgcttcctacagactgaattccgtgtcggagacccattctctggggagtacgctctttcacatgcctgccgtaaaaagtcagcagttcccaatccctgcctgggtaatcgacacaggtgctcatcacacgctccagacagataggagccttacctgtattttccactacagctgttcgggtaatcagatccagctcctctaaaactccgtaatataaggtgaccagcacttgtcctgtggtgtccctcatgcacacttttagtgtctctgcccccgtctcttcttcccagtacagtgccggaagaccgggaatcctgtatttccctggcctcacttcagcccctgcaaaccgcagttcacaggaagtgctgccatccggaaagaccaccttcaaagcgctggtacggtagtccccgcttccaaaagaggaatactcctgaggcagcgcgtccagggaataggttctgtcgttccccttatcgtagggattgcctgagaacccccggtcttcacagattattcggtacgaatagtcccagatcgccgtcttttttccataatatgtgtgcagcagtactccggcctcgtccaccttcatctgatacatggtatgggccgtcagcagtgtaaacagtgtctgactatcattgatccggattgccataaaaaacctcctcgtccttcttttattttaccgccccgtttagtatctgtttctggcaaatcagttaaaaagccagtaccggcagcagctcttacatatcctctttccttatttaaaatagtagcattttaccctttttccgtaaatatttctatgagtcagcatttattcccttattcgtctttccacggaaatagttgaagtatagacgcattttggtatataatagaacaaaattacgattctctgccggaggtgaaatatgtccaatgttttattttctatttttccgaacgaacattttatggatttaactttataccaatttgggtatgaaaaatgtgctccgcttcactctttcggcccctttgtgagaaatcactatttatttcattacgtaatctcaggaaaaggaaccctgcactccaatgatgcgcataacaatggggtcgtctaccacctgacggaagggtccggttttttaattgaaccggaatttgtcaatctttattatgcggatgaaaaagaaccctgggaatatatctggttagaattcggcggattaagagccaaagaatttctggagattgccggcctttccagagagcatccagtctttaccccggatactcccctccatggggaagagctcctgaacgaaatgttttctattgtccggaatactgccgcctctcccttgggccagattggccatctctatctgtttatggatcggctcatagcaggctcctccgtcagaaggaagctccagggaggacggctgagcgaattctatgcccgggaagcagtaacttttatcgaacaaaattattccaggaatatcactgtctcagatatggccaaacgctgcagtctggaacgcagttacttcggcaaaatctttaaagatgtcatgggacagtcccctcaggactttctcattcactaccgtatgtcaaaagccgcagaggccttaaaactgacggattcctccatcggtgagataggaagttctgtgggatattcgaatcagcttcacttctcacgggcttttaaaaatgtctgggggatttctcccagagagtacaggcagaagtataggctcataccccccggggaaccgtaaaaacccggagaaaaagcagcaggcagggaaatggacgttttcctctgtctgctgcttttttctatgatttgtgcaaacttttatgttctcctgtatctgtgcagtccgggtttcgtcagcagccagccctttcacatccacagggttttactgtaattgatgaaatcttctgccgctccagatacccgcaggcagacaggccggctctcaccacggtgttccatttctgggcggaaagatggtatacggtctcgtcatcaagcaccaccgtgcaggcgtcctccatagaacagttttctgagtatgctactttatacatgttttttctgctgatggctcctatctcctccagcacattcaccatgcggtataccgttgctgcgccgattctctcatctaccttagacgccatataaaatatttccttgcagcttgagcactcattcttaaggataatatcaagcagagtcaggcgctgtttagtaatcctgcagccacgctcccgcagtttttctatgataatctccctctgcatctgcgtacgctgatagcttctggaatctggaagttttcttttctccttattatttcttctatctgtcacctcagcctctttccctttctagtgtctgcagtgaccgccgcagtgtttgcagtcacatccgcactggagcgattttccattctttttactccgtatcatacttcttaccgccaggccaaccacacctatgacaataactccaactactatggttcccatatgctcttgcacctccttatagtctgagcctgcatctctatgcaggctcatgccgggcttcatgctgcttactgtttcgcactcgccattcttttgagatttacattcagtgtcttgctttctctgtacggtcttaccagcagatagataaatccaatcacaagaagaatcgctgtcacagttccgattccgaatactcctgcagtcatccagttacccagctggtatacacagagggataccccataggcaagaatagtctgatatccgatggcaaaccagaaccatttcacattgttcatctctctcttgatagcgcccattgctgcaaagcagggtgcgcacagcagattgaataccaggaaagagtatgccgcagctgctgtcatactgccggcaagggttccccagatctcggttccgtcctctgccacttctgcgaagccataaaggataccaaaggttcccactacattttcttttgccaccagtccggtaattgctgccacagcagatctccaatccccccatcccagaggagcaaagatccaggcgactccgtttcctatagccgcaagaatactgtgattcagttccatgtcttccaacattctgaactcgccgtctacccatccaaaatatgaggtaaaccatacaaaaatggtagagagaagtatgattgtgccggctttctttataaaggaccagcctctttcccacatactgcgaagtacattgccaacggtaggaagatggtaagcaggaagctccataacaaaaggcgccgggtcccccgcaaacatttttgttttctttaatataattccggagcagataattgccgcgattcccacaaagtacgcgctgggcgctacccaccaggctcccccgaagagggcccctgcaatcagggcaataataggaagcttggcgccgcagggaataaatgttgttgtcataatggtcatcttgcggtctctgtcgttttcaatggttcgtgaggccataactcccggtacaccacatccgcttccaattaacataggaataaatgatttgccggacagaccgaatttgcggaagattctgtccataataaatgcaattctggccatatatccgcaggattccaaaaatgccaggaaaatgaacagcaccagcatctggggcacaaagccaagaacggcgcccacaccggccacaataccatccaaaatcagcccctgaagccaggcagcgcagccaaccgcagtaagagcagactcgatcagtacgggaatgcccggtatctcaagtccaaataagctccaaccgtctccaaatactccttcattcgcccagtcagtggcccaggttcccactgtagtcaccgagatggaatatacaataagcattaccaccgcgaaaatgggcagtgccaggaaccggtttgtaacaatcctgtcaatcttatccgatgtggtaagtttctctttgctgtgcttcttataacactggctgataatggaaccaatgtactcataccgctcgttggtaataatactctctgtgtcatcgtccatctcttcttctatctgccggatctcctctgaaacatcaggtacatgcttcatctgggattgaatcttatcatccttttccagcagcttgacagcgaaaaatcttctctgttcctgaggaactgtgccatcaagtttatcttctactgcttccaggatctgttccaccccgggtgcaaacttatgcactggaggggttccctcctttttgcctgctgcggcaatggctttttcagcagccttctggacaccgtttcctttcagcgctgagatctcaacaacttcacatcccagcttctggcttagttttccgatatgtatcttgtcacctgacttttctactacgtccatcatattgacagccatcactaccgggattcccagttccatcagctgtgtggacaagtacaggtttctctcaatattcgtcccgtctacaatattcaggatggcatccggccgctcactgatcagatagtttctggccaccacttcctccagtgtatatggggaaagggaataaatccccggcaggtccatgataataacatctttatgaccttttaattttccttccttcttttctaccgtaaccccgggccagtttcctacaaactggttggaacctgtaagcgcattaaataatgtagtctttccgctgttaggattccctgctaacgcaattttaattgacatgttctacctcttttctgccaaaatggcaattctttttgctttatctgttgtatattgtaatgtctgtacacactaattataattcgttcaaactatctttaattagttcaaactaaccaatgggcaaaaatcattccacctgtatcatttcagcatctgctttccgcacggacagttcatatcctctcactgtgatttctaccggatctcccagaggtgctaccttgcgtacaaaaacctccgtacctttggtaatccccatatccataattcttcgttttaccggaccctccccggctactttaatcacttttacgcttttcccacagggaatttctttcagtgtcattcttgtctctccttctttatcctaccataattttgttggccatatcttttccgatagccacacgggactccttaacattcacaatcatattaccgccaatctctgagactacagtaacaatgctgcctgttataaaacccagattttccaagaatcttcttgtctcttcttttcctccaaccttacggattacgttaggttctccggcttttaccattgttaacggcatcatatcccctctactttcttaaagattgaaattgataatagttttcatttctgtagttagtatattctaacatccaattattgtcaagaaccttattgatactttttctcaattaccttttgtttgctgttgcgtgccggatatgttatactaattgaatctgacatataaacagtgaatattatggaattaaggtgggaataccatgcatgtgaatgaatctgctgaaaattatttggaaactatacttgtcctaagcaagtcacatcccgttgtccgctccgtagatattgcggaagaattaggatttaaaaagtcaagtgtcagcgtggctatgaaaaaccttcgtcaaaaagaacatatcgtcatgtcaaaagaggggtatatcaccctgacggaatcgggacaagagatcgctgagatgatctttgagcgccatgaactgttaacaaactggctggtccgtcttggggtggatgacaagattgctgcagaggacgcctgcagaatagagcatgtgatcagtaaagaaagttttgaggctataaaaagacatatcaagtgaagatcatacttccattgcaggaggcagctggttcaaaccagctgcctcctgtttcatcatacataatcaaagtcatccggcgcgtcaaaccatttgccttttcccagattcaggataaaacagattaccgccatcaccagataagccagagcaaagggagaggtgagatgcagccccagctcagcgctgtggataaatccaaaggcagacagcaaagcacccaccagacaggtgattcccactgcatttagctttttctcaataataaacacggtcattgtgcccagaagaatccctatgataattgcccctgactttaccgccggcactccgttccacataaccccggcatcgaccagctgttgattaatttccggagcgtatccggaaagcccgttggccattgtttctgtataagttcctgtaaggcttaccgcacctgtaatctgtgtaaacaaataatcagcaaccgggggcaccattgctatccccactgctgcatagtgcctcaccggcgtatccttgaacgcctgggataccataacgatggcacaccagatatatgtaatagcacaaacagcaggcggcaccagattattcaggaatgtaaacagtccaaaaatgccggccagcccgaatacgatgcccgagactgccgaataaccgattcctgcctctgatttcttaagtcccgcatgccccagccacacagtgttgggaactacgcctccaaataaagcagaaaacatggtacatatgccgtcagcaaactgtgcttcccggacactgtaattgtctcccgctgcattggcagcctccacattgtccatcgtctctataaaattatagatttcaatggggataataattgtaaggtagggagctacaacagcaaatccgctgacaagcgcctgcactgtagtaaccggattcggaaaataaaaacctattccggaaaagtcgaagtgtgtccgccccaggcaaagtgcatagataatgcctcccacaattgccaccaccagaggaggaattttttttggaaagagatatcctccaaatacaccgaacatggctactataaaaataggcagccccaccacaggatcccgaaacacgtcaaacacaccctgggttgccatccagataaacccgatcccggccacagtgccgagaagagctgctctcggcacttttttcttgatccaggggccgatgatgccgccgcagaattcaacaaacccgccgataaaacaggccgccactgcagcggaccaggcaagctgtggatcccccagcgcatagtgaagaggggtgattaccccgtagagcattacaaacatagcgggagtggaaacaccggaaggcagcgctgttacatcactgcgcccttcttttttagacagcttgtatcccatataacagtaatacaatcctcccagaagcagtccgatggacattcccggtatcacccggccatacacaatttcatccggccacttaagaacccctgacagagtggcaattacaatgagatagttcacaatgttattggtcacaatatatgtgataccgcccaaatccccgcgtttaaaaaaaggtaccgtaagttttgtctgattcactttttcccatcctttctcctgctgtggctaaaaacagattcccatgtttctcagctcctctttcacttccacatacatagcttcccactcaggaattggagttactgtctccatgtcgtacgcctcgtcaaagcgttttcctttattcttatcctccatctggaatatatgctcatattttcccagaagctttaacacgatctcatttgcctgcgcccgggtcattccctgtcttgccacagctttgcctacctcgcccatcaaccttacttcaagccctgtgccgttgggctctcttccgtttgcagatccaagcccttccaggtgtccgccgcatacggttacaacaatagaattcgccgccacttcatagagaagctctttggtgagcgcgccgctgctgggccacagatcacatacaataatggcgggagcacattttgcaaagatctggcagagtactgcctgaagccacaggcatcccctggccgtggtggccacttctttgatatggatgggatgacagaggtgatagtctgccaggcacaaaatattagctgccaggatagatgctgtcattacaagagtggcacccggagcatctcccgccaggcctcccaccatagtgcaggccagagaggcatttttcattccataatcaagggagttggcagcacgtatcagattcccgttgtcaataatcagttcgttaaacatcgccaccagatgggagtcgcatggacgcaggcagcgctcataggaggcactcagatcccccatttctgtaaccgcactctcagccgccaaaagccccataccaggccttcccacagcttccagagccttgtggagatactgaagttcccgcctcacggcaatcacttccgtgggatccccgcttttcacagtatggccgtccacatctaccagagatccgcaggtcagcaaatcgaccactggttcctgggcagagcttaacacattggcataatacatacgttccggcgtagggcatcccggattgccggcccagacagccggttctcttctgtcttctatgcctctggctacaagagtatacgcgtctttgccttctcccatcaccagctcctgtttcatgttcttaatgccctgctcaatctcttcctccgtaaatgtgataatacggcctgtggacatattgtagacaccgattttcaaaatcagggctttagcagccgccagcatatcctccaagagacggtcatcctggggaatgagaacctctttgtcccagctgaagctgtactcctctactaattcccggacttcgtctatcagatagtccatgtcccactcattctttgttacctttgttccagtatagctcctggaacagatttccagatactcctttgcattcatctgttcatcctccttatcctatcaccatttgccagatacttaccgcaacaagcaccgcctgtcccacatccagtcagttcttccgcaactctgaactgcagcacttatgataataccgaaatctgtttctgcagatttctatatatcaaaaaaggacgaaaaacctttaaatctaaaatttaaataggtttttcgtccttttatacggttgttataaaactatttgtaatataataccatattttgttatttttatcaatattttctattgttatcagtatttatttctgctaatccttttataagccctgctgataaaaggaactttccggtaacttattgattttacagaacatctgtactatactgtagacaagcttagaactgaaaggagaaatgattatgttaaataaaaaagtagctgaacttttaaatacacaggttaataaagagttttattccgcttatctctatctccactttgctaatttttatgtggagcagggtctgaacggctttgccaactggtaccaggtacaggcacaggaagagcgggatcatgctatgttatttatacaatatatgcaaaataatgatgtacccgtcacgtttgaggcaattgaaaagccttcttctggtctcggtggaaatatggatgccctgaaggagggattggcccatgagcagtatgtcaccggcctgattcacaacatctacgatgccgcttatagtgtaaaggatttccggaccatgcagtttttagactggtttgtcaaagagcagggggaagaggaaacaaacgcgaatgatttgatcaaaaaaatggagctctttggttcggatccaaaaagtctctatatgctggaccaggagcttgcaggcagggtatatgctgcgccttctctggtgctgtaaggcagaaaaaagggaggagagacctatatgcgtcttgaacagatacaggcactgctgaaagaacggcagcagccctactcctatgtggaagaagacggctgcggcagcattgactttgaataccggggaattgcctatcatgtctgggaattccaggacgaggcctggggggctgagaccaatgtgagaaacggcggctacagcgaagatctctacggggattatgaagcccagatcatacagattattaatgaatggaaataaacccggaaacccggaaaaccaactgattggttttccgggttttctctttggtgctattgctattttctggtcttccaggtaggacagccgtctatggtacaccggtttttccagcctgcagcaatacagaacgcagatatcagcagcagaatgataatgccaaataaaaccggacggtaatcattcataaaatcatagataaacccgtaggctggaatcaggaggatagatgccagaggagctcccatggaaaccttggcatatatctgctcataatccttctgtccataaaaggtaagggtcaagataggcgccagcaccataacgccggagctgaccaggccgtgcagaaaggtcgctagtccaaagatcataaagctgtgggatgcgaaaagaaagcctgctgccgccaaaagtccgatcacaatgataccatagcaggttttcagactgccgatgcggtcactgatcatgcctatggccacggatccgatggagcttccaacagaggcaaaggccagcgccatccctgtactctgggcggagtaacccagcagctgtccgtaggtgggaatatgctgaacaaatacccccactcctgtaatcgcaatcataaatatcagcaacagataaaaagatatggattttaaggctgtcttctcctctatctctagctgctgtttgggttttcctttgtctgccgccgtctttttttcttctgctccatagggcagcataccgctgtctttgggcgaattgcgcagaagtattaatgacgacaataaaataacggcaaatgtaacccctccaaccatgatataagcagttctccatccgcttccggctatgacagcagaggtgaccggctgaaggacagctccaaatagactgacgcaggccatctggatgccgagcataaggcctacatttctggaaaaccaccggttaatcagaatcggccccagaagatttaccactatggccgcccctatggcctggggaaccgcaagaagataccatccgtataccttatttaaaaacccgcaggccgcaaatgaaacagcctgcagtgcagccccggccagcgtcactatccggatatcgtacttgttgataagctttcccgcaaggggaagaaaaagtaccagcactacggaggagatgctcatgtagagggagagacttcctattccaaccccaatttcccgggataccggcaggaggaagagacctgaggtcatattgattccgccccccgcaaatccccgtattagtattactcccagcagtatattccacgcataatgccatcttctttcagtcatagctacccttccttttctatctgctccagaatctgttccatggagagtgccccgaatacggtctgtttttcatctataatcaacgccggtacactcataaggctgtacgtatttttcagctgggggaacatactgatatctatcatttctgcctctatctgcgggtttaagacagccagatgctgtgcggctattacggtctccggacagaaatgacaggacaaagagattgcgatctgcagctttaccttcctttggacagccatcacccggttttgcacagactcttccactccctggccaggacctgacagattatagacagccagcacgaaggaattaaactcgtggcccgccgggattccggcaaacttaaccccgctgtattcttttgtttctttcagaagcgcaatcatagggaagttctcagcatttacttctgcttccaattctttatcctcccccttgcgcaggatttccatatgaatcttattgcctatactgcatacctcttcacaaaattttctaagctcttccgactttttgctgtcatccaggataactgccaggtaagtctctctctccagtttgtcaaacaccgtctgtacctgagaacgcaattcctgtgagataatagcaggctcatctacagagtccgcctctttctgctctgacacatcccggcttttttcctcccgaatgccgtgcctttccttgtattctgtgatgtacttttctacctgtgttgccgcaatcgccccgtcagaggtagctgtcaccagctgcctaagaagctttggcctgagatcccccgcagcatagacgccggaaagatttgtctccatccgttcattggttaacacatgccctgcctcgtctaatgcaacctgtccctggtacaactctgtggaaggctgataaccgataaagacaaagatgccgaaggtttcatcctccttcgcagctttgtactcaaagctctctcccgtctgattatttttaaatacagcccctctgagcacagtatccccgtatgcctctgcaatctccgtatgaaacataacttcaatcttcggatgggaaagcactttgtcagagatggattttgcgcacttaaaagcgccttttctcaccacaacagtcacttttttcccaaaccgggtaaggtagagagcctcttcagccgcactgtagccgccgccgattacaaaaatatcttttccctcaaagaaaaagccatcacaggtagcacagtacccgattcctctgcccctaaactcctcttcccccggaaaacccagttttttaggctctgcgcctgtggccagtataacagcccggcttcttaaaaccccggagcttgtctctacctctttaatctcctgggtaagcttcaggttcactacatcctgctggataaattctgttccaaaggaagtagcctgctccagcattctttctgccagttcggtcccggatatttttttaaagcccggataattcgcgatctcatctgtaattgccgcctgaccgccggctccctgtttttccacaacagcagcctttagctttgcacggcccgcgtagattcccgcagtcagaccggcacagccccctcccagaatcagcagatcatatatatcattttccatatttaaaattcctttcctgaccgtactcaaaaatgccgcatggggaccagctgcaggtccctgcggcagattcttataattttccgattaaatcaagacttggagaaagtgtttcctcacctggcttccattttgccggacatacctggtcgccgtgaactgctacaaactgtgcagcctgtaccttgcgcagaagttcttccgcatctcttccgatgctgttatcgtttacttcatacgcctttatgactccttccggattcacaataaaggttccgcgaagagcaagtccctcctcttctatgagtacttcaaacatgcgggccagttttccggtagggtccgccagcatcgggtactggatctttctgatggtatctgaagtatctgcccatgctttgtggacgaaatgagtgtctgtagacacagaatagatctcgcagtcaatttccttaaacttctcataattgtcagccagatcccccaactcggtagggcatacaaatgtaaaatctgccggataaaatacaaataccgaccagtgaccctctatacagtttaaggttacttctttgaactctccgttctgataggactgcaccgcaaaatcctctaattttcttccaattaacgccataatttcacctcctgatttattctgttttagtatctgcgtacatggctgctttatgcaaaaaacggagtgtatattttgcgtacatccgataaaactaactgtaacattataaaatgaaggtggtaaaacatgaaaaaactccaaaacaaaacagctcttgtaacctctgcaacaaagggcatcggcctggcctgtgcgttaaaattagcagaggaaggagccagggtatatatgggtgtccgcagaatggaggatactcagaaaatttgtgatgaatataaagaaaaagggtttgatatggccccagtatattttgaagccactaaagaggagagctacgcttctatggtggatgaggtgttggaccagagcggcagactggatattctgattaataatttcggcgtcggccgtccctctgaggatttggatctgattcacagttccgaaaaagctttttttgatcttctgcatctgaatcttggaagtgtgtaccgaatctccaagctggtaattcctcatatgatagaaaacggccagggaagtatcgtaaatatatcctccgtcggagggtctatcccggatatcaccagaatcggctatggggtatccaaggctgcggttaacaatattacacagcagattgccctgcagtatgcccgggataacatccgctgcaatgccgttcttcccggcctgacagctaccgacgccgcactgaattccatgccggaatcctttgtggcatccttcctgtctcatgttcccctgaaccgcatgggcaagcctgaagatatggccaatgcagcacttttctttgccagcgatgactcctcctatattaccggacatatcatggaagtagcaggcgggtacggcctgggaacaccacaatatgcagatatggttcggaaatccttatagggaaagctgtctaatgggtattttaaggaatctgccaaaagagggcctggagcaatccggctctcttttggcataacactgactcttgacttcccttctcccccatcttataattatcttatatttattacatatgtaagacttacccagctctgaaggagggtcttttcatgaacgagtttggtttacggtttatactcagtaatctgtttcttactgttataatagctgccattctggcagtaaaaaaactttttcaaagacacatgtcggccagccgccagtatcagctctggttcctgtttttactgctgttagttctgccttttctgcccgctaaaaataccggtttttctgtctattccttgatatccggacataagaccgccaaaataggcaattttactgcccctggcacagttaccgttcaaaatggagacgcccttcttttaggagattacgcgcttcctgtgaagcaatcagatgtcttccgcccgggcagtattcttgtaatcctgtgggttctgggaatgggggttatgtgctggtacactctgcgctctaacgtaagattataccgccgcctcagtgccgcccttcccatacaaaatgtacaggtacggggtatttaccggcaatgcgtcagagaaagccgggtgaaacgggaaatcccgctcttcagcagtgcctttctgcgctcacccatatccgcaggattctttcacccccggattattcttcctattcatttattatcccatgcagataagaatgacatccggtacatcctgctgcacgaactccagcatctgaaaagaaaggacctgggcatgaatctggtgttatgtctggttcagattgtatactggtttcaccctgccgtatggtatgctctcagacggatgcgggatgacagagagcttgcctgcgattcccaggtgctgcagatattggatgaaggcagccgcagagaatatggaatgactctgctcaaatttgcaggcagcttttcagaggaggctttcactgctgctaccggtatgggagggccaaaaagacagcttgaaaagcgtattcttggaattctcagttatcgcagagaatcacctgtctccaaagttaaaagtatccttgtccttcttctgacaggtattatggtcctgagcagtgcacctgtcctgtcagcaggtgcttctccagaaccttatcccgtcccttcctccaaggtcagtaatttggaagcagattcctattttcagggataccagggcagctttgtgctgtatgatatgagcgaagatcgatgggatatctataataaagaaggtgccgctgccagatattctcctgattctacctataaaatttataccgctcttttcgccctggaaagtgggatcattaccccccagtcctccggcctgtcctgggatggctctgcctatccctttgagtcctggaaccgggatcaggatttggattctgcaatgaagaattcggtcaactggtactttcagaaattggatgcagaactttgtgcggataacgtgggaaggtatctgaaacaaattagctacggaaatcaggatatctccggaggaatgacccaatactggctggaatcctccttaaaaatatctcccgctgaacaggtagaactgctggttgatttttataagaacaatttcaaattttctcagaaaaacatacaggctgtaaaagattccatatttatcactgcagaggatgggtatcggctgtacggtaagactggcactggaaatattgagggtgagaacaaaaacggatggtttataggttatgcagagacggacaataacacctatttctttgctgcaaaccttcaggctgactcaaatgccgacggttcgcatgcagcccagatcagcctggatattttaaaatcactggatatcctgtcataaggcgtttatcctgaacgcttctcagacacatgcctgctctgggtgagtatgcaggtacatcatttatgttagcattctatttaggaggatttaagtatgaagaaattacctcagattacagaggcagaatatgagattatgaaagttgtctggaaaaaggctcccgtcagcacaaacgagatcacagaatttctcgttaagacaacggcctggagtcctaagaccattcagacgttaatcaaacgtctggtaaataagggtgcgctcacctatgaaaaggaaggacgtgtttttgtctatactccattagtgcgtgaagatgaatatctggattatgaaaacagcacttttttgaaccggtattacgatggaaatctcacttctatgattaccaattttctggaaaaagaacgcctttccccggatgagattcaaaaactgaaagacttgctgaaccgtaagacagataaatagttggtgtgacttcttctaaatcccatacaccggctcccttttattgctctgaaaagtactgttctaacatgtggtttacatgttccactacacagccgctcccgcccctgtcctttacatcctctgtcatgttcagcagcaaaagaggttttttctcattgggatccgctgtaaagactccaaaccatccaagttctgtacccccgctgtcctctttggaagccttaatctccgctgtgcctgtctttcctgccagaactacattctctctgtgggcagcatatccggttccctccggcgtattgatcactttttccatccccttttttacctgttctgcaatttccggagtaaacgcaccaggaatccagtattctgcctcgggtgtctccctatactgcagataaggctttactacactaccgtcatttacaaaagctgtatacaaaaccgccaggtgcaggggatttaccagaatctgtccctgcccatagccgctgtctgccagcattacttcggagtcaatttctttgctgttagaatactgcgatattcccatgggaatctcaaaaggaatctcccggccaaagcccagtttatccagggcctcctgcaggggttgtgctcctattctgagagccgcctttgcaaaatagatattgtctgaacagatcagcgcattttccagggtcgctggttcacaggcatgaagggtagtcacaaaatagtccccccagcttttgtctttctgccagcttgttccctcacttccataatcctcattcgggtcaattgcccctgccgccagcccaatagctgccgttatgggcttaaaagaggagcccggtaccagtgtctggcgatagcggttaaccagaggcgtagacttatcctcattcagttctgaccatctcgcctctgaaaaccctctgataaaatcattgctgtcaaaagacggtgtgcttacaagagccaaaacctcccctgtatatggattcatagccacagagcagcttttttcctctcggaactcctcataaagactctgctgaagttctgcgtcaatggtcagctgaatattcttcccgtcctctttggcagagaatgccagcgtttcttttttgtttccgtcttgatctataatctcaatctcatatccgtctctgcctttcagctctttttcatagagactctcaataccgcttctcccgattacactatttgtcccatatccttccccctcatgtttctccaaatcctcagcagtcaccttctgaacatatccggtcagatgggaagcgctcttattcagagggtaaatccttgtctctacatcagatagcataacccccggtatttccagaagcgcatcctgcagcgcctggttctgctgtgtctcttcctccggctcataagttaaagtatccagctctgaaatcttcggcaatgtggcaatgggcacaaaagtatcctccctcacccatttcgcatccagcctggtttgaatcgcatctgcagatgttcccaaaagcccggccattttttccaggtccccggcagtatcctctctcatctttcccggaaccagtcccactgacgttgacagcccctgacctgccagtaccacaccgtttctgtcctgaatctctccccttgctgcttcctggacagaaacctgtaccttatcctccttctccaggccgggaaatatcacatgatcgtcccatcgaagggcgtaccccttctcctttacaaaagctgcctcattctcaaagaaaaattctcccgctactcctttgattgtctgttgataagatactgttacctgagacttatgtttttttatctccaaaacctctgtgctgacctcagaagtctctatcccctcataaatattctgattgcgcaggataaatgcttcctccgtatatgcagtcctgctctcatcgcttaacatagcatacatacccttgtagtccttttgttctatacactccatatagtgaaccagaagttcctccggcttttcgtaaaatccaggaaaagtccgcagaaacaccccggcggacactgcggccgctccgcatattcccagcacgattactgcggccttccttcttttttttctcgtcttcctctctgtcccgttccccatagttctgcctttcttactattgttaaatactccctgtgtagtctgttgcatttaaatattacacttgtaagatttaaatgtcaagttttttctctgtctcctctcttgccttttattctccatcctgtatataatataaacaaacgctcaaaaaaggcactacatataattagatactatggaggtttttctatggaaaacatgaaaaaaataccagaatgccctgttgaaattacactgcagctcatcggagacaagtggaaagtccttatcatccgcgatctcctcacgggcacaaagcgtttcagtgagctgatgcgttccgtcacaggcatcacccaaaaagtcctgaccagccatctgcgggctatggaagccgccggcctcgtctcccgcaaagtctatccggaagtccctccaaaggtagaatattctctgactgaaactgggtatagtttaaagccaatattggattctatggtgttgtgggggatgcaatataaaagtaaattatagttttgtgtaatagttttgtgtatgtgaagttcggggttatgtagtcggcgagcgaggcgttgcagacggacggatatagaagggagcaccggggagacagggctaagccaggggccgggccctgtctccccggtgctcccttctatatcctggcagagactcacttcacattcacggaaaacgggtggggaaggtcgagagttgtacacttatcctcttgatgttttggataaactgccaaaaacctccctcatcctggaactttcctctcaccgtcccccttgctcccgcagatcaatacacctggtgcatacctgctttgcaagggccttgttgtgtgttaccattaaaagccctatattcctctcctgcacttcctttaccatcagattccatatctgggcctgtgtaatcacatccagcatcgtactcatttcgtccgccagcaggaagcgtgttccctgaaacagggatctggccacacagaatctctgaagttctcctccggacagctccctgggatatctccccagccagtccttctcaatgcccagggcatccatcacttcctcccgaaacatgccggattcttccagaacttttttcatcttccacctgggattaattgctttttccggatgctgataaatcagctgtaccgggctgacccctcttttttccaacggtttcccgtccagaagaatctctccggaagctggtttcaaatatcctcccatcagccgaagaagggtacttttcccataaccgctggggccaatcagacccacacgctccccttcttctaccatcactgtcacatcctccagaatccacggggatcgctcattataccggaagctgacattttttgcttcaagtcgcatggatacacctcactgttcccccacgcaattgtcgcatgggtattggtttttcacactcttctgtacggttcggacatctgggcgcaaataagcaccccttaggcagtgccttcgcatatggctgaaacccagggatcgggacgaaaccgttctggggcagtgccctccacagagcctgggaatagggatgccggagagcctccgggccttccctgaagtcttctgagggggcaatctcaaccgtcgtcccggcataaaagacagccacacggtctgccacatggaatgccaaatcaatatcatgagtaatcaggatcactgctttgccttcgtctgccatttcgcggaaacaagttaatgcctccactgccatctccagatccagtcccggggtaggttcatccgcgataatcaattccgcaccgctgatcagtgccgttgagaccagaactcttctggccatgcctcctgacagctgaaagggatagagccgctccacatgttcttccagatgcagcctggagaatacctctttttgatcttttcgctttctctggtctggcttttctcccagtacctgtgtccctactctcatagagggatccaggtaggcaactgactggggtacaagcgcgatttcccttcctctcagctgttccttctccttctgtatcagaggcatacctttataatacatctctcccgtcgtggcggcattgtccggcagcagtcccatcaccgcatgggccagcagactcttccccgatccgctggatcctgctaccgccacaatttctccctgcttcacatctatgttcaagtttgatattaccttcagatcatactgctcaagccccgtatcgtacatgtgaaaggatacggaaagatctttcacctctaaaagaggatgtgcatactcttcctttgttttcttttccattcctctgcctcctattcatgtgcactgtagggatctacaatttttttcaggttctctcccagacggtcaaagagcaaaaccacgatgaccagcatcaggcccgggaaaaaagccagccaccacatgcctgtggacagatatttcatagattccgacaggataattcctatagccggctgctccggcgacaatccgaatcccaaaaaagtcagggaagattcatgcataatggcatggggaaacatcaggattaatccgatgaggaactgaggaatcatatggggaagaatatgatgtatggttatccacctgctgttatggcccagccttctggacacttcgatatattgctgggaacgaatctgcagcacttcgcttctgatgagtcgggccagtccggtccaatgggtcacagccactccgatcagtactcccctcagtcctttcccgcaggcaaaggatattaatatgagcagtactgtatgaggtatacccataaccaagtcaatcagccagttgataaaatgatccagtctggaggatcctgttgctgcggccacccctacaagcagtgcgataaccgcacttaccgaggaggccaccgtgcccaccacaatgctgatggacagcccttttatggttcgcaccagcatatctcttcctaacagatcggtgccaaaaggatgctcccaggagggctttaagcctttttgggaaaaatctgcctgtatcagctcatcagacataatagttcccgccagatagataccaaaaagaaaggcaaaaataagtatcagggtcagtatggttctggttctcctgtttacaggaaatcttccggtcctactcttcatgttcataaccctcccttatctggggatctgcaattccatagatgatattggccagcatatttcccacaaacacaaatactgcgctgaatagcgtaattccaagaagcagggggatgtcagatcccattcccgcagccgaagctgccgctcccagacccggataggagaatacagtttctgccagcacagaaccgccgaacagctcactaaaggagccaaactgcatagttactgccggaagcaggatgtttctcagtccgtgccgtttccagatactaaaatgagactctccgctggcttttgcaaaaagaacatagtcactctccagaacgtccactaatttctctctggtatgcagagccacatttgcaaaagacaggaagctcagggtaagtgccggcaggatcaggtggtgaatgcgctggagcaaagtcacctgatccgccggaactcctttgggcacgctcattcccatgggaaaccatcccaatttaacagaaaacaccatcaaaaagacgattcctatccaaaatgtggggatggcgcacatagtaaggcaaacttttttgagaatcctgtccggccactttccattgtaaactcccattatgcagcctatggtaaatcccagtacaccggaaaacacccaggcggtcagcataagcgccagggaagccgcaaatttttccccgatgatatcaagtaccggtctgcggtagatcagggaggttccaaaatctccgtgcagcagagatttggcccagattgcgaagcgttctaccgggggatcattgagtccccaatattcggcaattttttctctctgctcttcacttacattcggtacagcgcccacatactgctgtaccggatccaccggagacaagcttaccaggataaaacttatgatgctgattgcgataagcaaagtcacaaagcgaattgcataccgcccggtgctttttactattcttttactgttcatcttctgctccttctgaccgtccctgcctcagcagggcgccccaaaaaggggaccggttatccgcccgtccccgattctggttattctttccattcccactcagcaaggttggctatcagaggccacgctgcaccgtgagcatggattctctgttctcctatatcaagtccttcttttacgtaataaaggtgagacatattcacatagaatgcccagggtgcctctcctctcatagaagttcctgtagtgccgtcccactgggccttcttccaccactccagagactcttccattgttttggagttcatggccttgtccagatagccgtccacaacttcactagtgaaaaattcaggattgtaaaagtctgtctttcccgcattgctgctgtggaaaagcatataagaagtcattggactgtctgacccccatcccatgatcattggctcggagaacatcctcttaactgtatcgtcggcgctgaccccttccacatggattgcaattcccagcttctcctttgcctgattcgccacggacatagccactgcctgtctcatggaatccccggcaaagtacatcaggttaaattctgccttaagatcgcccttttcccggatcccgtctccgtcggtatccttccagccggctgcctccaactgctgcactgcataatcaatatctgtttcaatgacatcttcctcgttccaccagggcaggccgtcacattctgagtacgcaggttctgcaaatccatttagggcctcatcgatgatctgttctctgtcaattccgtaactcatagccttgcggattgccaggtccgaagtgacattattgccaattttatatccatcctctgtcgtctttccctcttcgggcagcataggaaaggtaattccccggttatccactgactcaaccgacaccaccttcatcccttcgatttctgtggcagccagcgttgccgaggtgagcgcaagatctacctctccagcctgagcagctacaaatctggcatcctcctcctgcacaaggaagactgccttctttatcttcggctgttccccatagtaatcttcattggcttccagaataaactgctgccctttgtcccactgggtcagtttatagggtccggagccgataggttccataccaaaggaatccgaatatgtatcctctggcacgatacccgcccctgccactgtatagataaaagtaacacaaggtttgttcaatttaaactcaacggtagattcatctactgccctgcagctctccagcatggtaagatccacataagttgccttatcttttgtagtattaaaggtaaatgcaacatctgaggcgtccagcttttcgccgttggtaaacttcacgtcgccgcggattttgaatgtccaggtcagaccgtccccgctcatactgtattcggtagccaggtcattttccagctggttttttccgtttacttttaccagagtgctgaacagaggagagcctgcatatccaaatccgctgcagggatcccagctgtctgtatcgttggagaatcctaccgtaatttctgtctttcctcccccctcagtcccttcctcacggccgtctgtgttttctttttcactgctctgtgtttccttctgctggtcctttgctgcttttgtaccagagtctccggaaccggaacatcctgccagcagagctgctgtacatatgagagctaagatagctttccttctctttttcataccttactcctttactttgtccttaccccaaagggcaagctcttaattttctacaggataactaagaatccgcagctgcacaagccacccccagggatatttcatttatctttttttctccagaaaagaggcagaaaaatggctttttcaaaagactcccatccctaaccgggggttccccttctccagagaaattaataaaatcctggattttgtcactttattgtcacctgaaacggctatcatggtatcatcaaataaaccgagagggaaccagcagcatgtaccctcaggacttgcatgcggcacagccgtatggcagcagaaaggagactatttatggaaatactgcgctgcagccacctgaccaaaacctatggcagtggctctaataaagtaactgcactgaatgatatcagcctgtccctggagaagggcagttttactgcaattgtcggcacttccggctctggaaaatctacgcttttacatatgctggggggcgttgaccggccaaccagcggaaacatttatattgaggacacagatatttcaacgctctccatggagcagctggcagtctttcgcagaagaaaagttggtctggtatatcaattttacaacttaatccccacactgaatgttcagaagaatatacttcttccgattcttctggacgggcaaaagcctgatatgaaccgttttcatcagattacggaggccctcggactttcagaccgtctctcccatctgccccgggagctatccggaggacaacagcagaggacggcaatcgccagaagccttatctaccagccagccatccttctggctgatgaacctaccggtaatctggaccgaaagaattcagaggagaccatagagcttctgaagttatccaaccgtcagtacggacagacggttctgctgattacccacgatgaaaaaactgcgctggaagcggatcgtatcattacgcttgaggacggcaggcttctccatgatgaggcggtgactttatgaaaatagtaagagaatatgtttgggataccctccggcaaaataaacgcaccagcattgccattatggctgccctttaccttatgacagccatgatgtcctgcttctgcgaatttgtatacaccatgtggacggattccctggctctgacaaagctggagaacggagactggcacggggagctttttgacacaacttacggcagagacctggaacagatagacaattacgcctctgtatccgccgtgcttgtaaagggtccctgggaagtggcacagcttggggacagaggccgccgcaactacattatctcccggggcgccaataaagaatactgggaatccatgcctgaaaagaacatactgctggagggaaggattccccgaaaagacaatgagctggctctctcaaaacaatattttgacgaccatccggaagcaaacctcggagatacgcttactcttcctgtaggacagcgaatgtatgaaggcaaggtatgtcaggagacagccggctatcatgagaatgaaagcttccgccaaagcggcacaaaatcctatactcttgtgggcaagctggatgcaacaacctcctcctctgttcccgcctataccggacttacctatctggacacgaaaagcctccttccggacgatcaaattaccgtttatctgcggtttgatcccatgcgcagtacataccgggagctccctttgctggcagaatccattggatatgagaaagatgaatatgaatcctattcactgaaatataatgcaaagctcctggcccattatgccatccttcctccggagctgaaagaaagttcagccctactggaggcctttgcagttccacttatgtttctcgtaatagccgctttaattgtaggggtttttgtcctgatgattcacaatgccttcgcgctctctgtcagtgaaaaaataacccagctgggcactctttcaggcataggagccactcccggacaaattatgtccgctgtgacctcagaaggttttatactcatgctgcttcctctgccactgggactggtcacaggctgggtgctaaatacaggagtattcgccctgatcaatgctactaacgatgtaggaagatcctcgcctgatattgcggcatcctttgggattccctccatccttcccgctgtactcctgtcctggatcacggtctggctttctgcgcggatacctgctagaaaagttgctaaaatgatgcctgtggaggctcttcgtcagggagaccaaatcaaaggaaagagactgagaaaaagccatatcaccagccgttttggaattatcggagaactggccgccaatgccctggccgccagaaagaggtcttaccggactgcaactatctctctgtgcctgtcctttttgcttctgaccggatttctgtatattcttacggcccagaaggctgctcaggctgtctatcagggaaaatcagacagaagtcagcatatcacctttaccataagtgatggacgccctccggagcaggaagccctggatgctgttaagaatattcccggcatcgccagggcagatatctacaacactctggcctgtgccacctgggtgacagaacaggaagcctccgacgatatggagacctatctggggggatttgacaaaatcgtatcagagaaaaaatattctaccattgagcgtgatggaaaatacaggattttttctaccctgatcggactggaggaagacagcttcagagattactgcaaccggcttcagatcgatcctgcgccttactttgctgatgcttccagagcattgatttacaatcagaccgaggaccccaatgtgagtaccagaaaaaccagtgtgtacagagatcttctgaaactctccgaaggccagagcatcccatttacagaacaggcttatgacgaggacaccggcagctatgaatttgctttgaccgcaggagcgctggtagatgaactgccctctcccgcaatgcggttttccagattcacactgattgccgtcatgcctatggagcatgttctgaaaattggtgcatcctgcggtgaaaaaaggcagttttcctccagcagcgttaccggcatccttcttacaagcgaagacggcagtgtctcctatccccggatccaaaaagcctctgaaaggacagaggctgtgctggcaaaatattacggaagcggagattatgtcgtatctgatttggctatgagaaagaagatgagcgaagactccagtctggccatgagtatcattgtatcctgcctcacatgcctccttgccctgataggtctctccaatgtgtgggccagcatctctgggaatctccgccttcgaagccgggagttcgccatgctgaaatctgcaggcctctcccccgggcagctctggaggctgctgtatctggaaggtatctctctgggtctgaagccggttctgttaagcctgccctttcaggctgctatcctggggacattcctctcaatcaatgagatttccctgtcccagtacctgccttatgcccctgtctttgccctgctgggatatacccttctgatactggctgctgtcatgggggcctacattgcaggaggacgaagaattcaaagagagactatcattacagctgttaaaaacgataccctttagcagtctgctttcgtactgctatgaggttcaggataaaagcgcaggcgaaagcgggcatgtccggcgggggaattctccgcctggatatgtccgttttggctttctacaatcgcctttgccagggccagaccaattcccgcactgtccttaactgctccttcccctctgtaaaagcgctcaaagagatgagggagatcttttctcgaaaatccccgtcctccatcctccacctgaatctcagtatacagtggattcttatggtaattgacgcagatcctccccctcctgggcgtgtgctctatacagtttttcagaatattaagcagggcctcccctgtccactgttcatctgtcgaaaaaaagacatcgtcctcgcctttcggtgtgatctccagggttatgttctccctttccagaatttcccgaaggggttcagccgcgtttttgataagctccagggcctccacacggctttgctgaaactgaatcacatgggaatccagcctggccagcgtgagcaaaccattcaccagacgggtcagacggcccacctggcgcttcagatgtgccatatatccggccgcctcctctgtctgatactcttccagaagttccgtcatcagcgacatagacgtaagaggcgtcttcagctgatgggcaatatccgcaatccgctctgataagacctcatgttccttcactgccttctcctttgtacaggccagttccatcaccgtcttatagctctcatcctccaggcgggagaactcatcctccgtcctggaaagggcgcccgcctccccccggttcactgcctgcagatattctgtcagttccctgatcctttttctccgcatacgccgtctcttcactctgtgggcataaaggcatccccctgccgccgcgaagatcagagcgtgtatgccccaggcaaacagcagattatgttccagatttccatagggacggtatccgtattttttcagatattcttcacctctttggacatcctcgtctgatttacccttgagaccctctgccacagaattgctctccagtacggctcctgtcagaccggcagcttcccggtattcatgagctgttaaaaaaacagcggaaatacttcccgccgccaatcctactatcagccaaacgataattgcctttgcaaaagctttacccccagtctccgtcatctgttttcctccaaacggtagccaattcccctgaccgttacaatatactccgtatttcccagtttctctctcagacgttttatggtaaccgtgagggtgttatcatttacaaagttcccctctgcgtcccaaagtttttccaagatcagtcttcttggcagtgtccttcccttattttccatcaataccaaaagaagccggtactccagtgcggttaaaccaatctcttccccttccagaaccgcctgcatccgctctctgtcaagtgaaagtgcaccgcaagtaagaacgacttcacgatgtgccgatacccgcctgagaacagctccgatacgggattccaataccgaaatattgaatggcttcgtgatataatcatccgctcccatatccagaccttttgtaatatccctcacttcatcccgaacagtcagaaatataaccggaatatccatacgctgcttcacccatcggcagagctcatatccgcttccatccggcagattcagatccagcagaatcagctgatacccccctgaaagcaggctttttgcctgttccatcgaggaacaggcagtcacctgataaccttttttctttaatgccgacgaaataccaaaggaaatggcatcatcatcttcaatgagcaataattttgtcattttatatccctttcatctcctgttttctcagttcgcagccagcgtcttaccttttattttaacacttttcctgctagaattctatccgcattctgaatctggaagctgctgctaggattcatcatacaccagttctgtgtctacatattttctctccatctgatgccgggcttttctcttttccacgctgtcaaagataatagaaaaatcataatcctccggataaagctgctgggctgccacctgcagcttgattcgtttatggctgatccatatttttttgtcctgcatctgtacccgcaggacccctttttcattggctgtctgacacacaatgccaatctttttatcggggaaaaccataacactgtcccctaactgatatttcatagcattctcctggcgggatactttttttgttttctgaatcctgggatgggacgtcttttggaattcttcccctccggtgataccgccccaccgggcgtcaaaggtttctgcataggctgcctttgcagctctttttagcatacgttccggcattcccagcttgcctgcaatataaaaggcacagctctccccagcctcgccgatgaccagctggtataaaggcttcagactttctttgtcaaaggtcatcctggcatttacgatccccgactcctgttttgcatattcttttacctccggatagtgggtggtaactaagaaaagggcgccgcttcttttcaattcttccagaattgcgatggcaattcccattccctccgcagggtccgtgccagaacccaattcatccatgataaccaggctgtcccggctcacagtccgcaggatattcagcacattcgtaatatgggcggagaacgtggacaggttttccgacagattctgtccatccccgatgtcacataaaaaggcattgttcatacatatttctgccttctcacaagtcacatggagtccgcactgagccatcatacaggtaagagcaactgtcttgatggcaactgtctttcctcctgtattcggccctgtgataattacaccgtttactccttttcctatctcaaaattaagaggaacattcactttcctgtccataagcggatgtctcgcgttcctcagccgtatataccgctccgtattaatttcgggagggattccgtcatattctatactcaattttgccttggcaaacataaaatccagcttctcaatggtatggctgttttgttggattaccccggccttatctgacagcattgcggttaacgtgtataagatcctgatctcttcattttcctcatcaattcttagctcctgcatctgctcatataatttagccacagtagatggttctatgaataaggtattgccagtggaagatttgtcaatcacagaaccgctgattctgaatttatactctttttttaccggaatgcacagccgcccgtttcttacagtactgaagctgtccgccatatactgcttattagcctttatcacagaatcggctttttcatgcatttttgcatctgtccgctcaatggcttctctcagtgttttcagccgcttagaggcatagtcatctattttcccccctctgatcttctggttcagttcctccctgatttcatccagaggttccagattctcctcatagtaagccatccctatttcataggcttttcctctgttcaggtaatccttcattcttttcacagcggaaaaggtaagcgcaatagcctccagctgctccggagtcaggcatcccccttgttctgccagtttaatccatgcttcaatcccctgcagagctgtcagaggcggattaccgcatgtttctatcataacctttgcctctgtggtctctcgtaactttgcttttacttttgtctctgataagtagggtgttaaactctgtatcttttctttggctttgtctgtacatgccagttctgttagtttttcttttattttatggaactcaagtaatctttctgtgtctgtcatatgactcacctttctcttgcctttcttgtttttgtaaaaataaagccgcggaagtatcgccttatcagacatacgactcccgcggcacacagatttgttgtataatgaaacagacataaaaaagcacagccatagagccatgctttttttccgttcattttatatacagagttctgcaaaatgtatgttagcattgtataaggcagataaaagggcgcaacaaacctcctgacggaatctgttataccctcacaactatttaattagctgtattctccattataaccacaagtaacatacactacctctttttcattttaattttttttgattataagctatctttcacccgttgtcaacagatttcctgttttttatctgcagtcttatgtacttacaggataaaaaattcattctcccgccgcacgtccttcagtgctcccagcatctgctccatgcgctcctgcaggggagggggcagaattcgggactgattgggacagactgcggtacaggccatacagagaatacaggtatttggatctgtggcaatgtgcccctcattcactgtaatcgcagctgtaggacagacctcttcgcatttgccgcacaggctgcaggtttccagggatatgggcggggctgggatcgtcattgcctctttataaggctgatttccgggaaccgtaatctctgtacggctccgattgtccagcttgctttctactcgtttggcaaacccggtgatttcagaaacgtccttttcatccggtctgccctttcctacatcgggtgccattgagtgctgagcaatgcatgctcccgaagccgcaatctggaatccctgatgggaaaccgcctgattcagttccagcagcgcatcctcatatgccctggtaccatagacaacaaacgtaactgccttcttaccgcttccgtccagtgcctttatcttatctgcgacgagggccggtatccttcctccaaaaaccggtgctgcaaatactgccagttctccggccggattggctggctccttctccctgaggcccagattatgatccatcacctcccctgaaattgctttgcagaaagcttcacccaccttttttgtccctcccgtgggactgaaataataaaaatctgtcctgttcaccataaaaacgcctccaaacgttattcatatattataatcagtataatcccctctctctgtgttgtccaccccgcctttatgtattatccttcacacagacacgagaatcactcctgatgtcccgggaatgcagcaggagcaacggggaatatcaataccctgttgctcctgtttacattatggctgcgtgctgctttttacgggaagcatttcaatatatcctcttgtaccgatgggttccagctggatgcggggattcccggtatcccactgatatcctgcgacggccggctgatattttttaatggcctcctggacttcttcgatcgcctggcagtaatcctcctccgcaaagggttctccctgaaacaccacatactctgcctccggaagctccagtacatcaaatccctccggaacttctccgtggtaatccatgggcacttctactccctgcacatactcggaggtacccggtctgcgcattctctccggaagccaaagacataccggttctccgccgatggactttatgctggtaagcagtccccatacatcacatcccacttcctcacagtacgtaaagtattctgtggctgtttttcctcttttaatcaaggcctttctttccggcttatgaaccatatgaatgtatacattttttacctctgccatttttctgttctcctttcgaatctcgttgtataaaactccatagggaacgaacagatacaaaggaaccggatgtctggcatattcaccgggattgcacccgaattctcggaaaaaggctctctgatatccttccgcgctttgaaagcctaaatcaaaagccacatcaatcaccttggcatcttcatccctcaaccgcaaagctgatttggacagctttaatctcctgatgtaatctgccggagtataattcgtatactcccggaacaggcggtaggagtaccagggcgagaacatagacgcctttgccagatctgccagtgtaatggtttcttctaaatgtctttcaatgtagtcctgcattctctgaactgccaaagtctgttccatcatctgttcacctcctgatgtggctatcataccttatcccgtcattttcttctcgactttttttgctgtgttatctgtaagccccctgctgaaacagaatatctgccttttccatccgttccactacgtgtactccaaagggacagcgctcctcacagcctccgcagccgatacaatctcctccgccggcggtaaggcctatgtaatgggcacgcacggcggaaggcacctcctcttgcataactgccagatcgtaaagcttattaaccatagcaatatcgatccctgcggggcagggggcacagtgtccacagtaggtacactgacctgaataggcatggcggggggcatttgccagaacagttgcgtaatctttttcttcctcagcggcagtctcataggccactgcagccgccacatgctccggcgtgtcatatcccaccatcacactggccacagccggtctggtcagcgcataatgaagacattgaaccggagtaagagccactccgaagggagacgtctgagcagagaagagacggccgccggcgtatcctttcataaccgtaatgccgattccccgttcctcacagatccggtacagtgcttctctttccggtgcaattccctttaaagcttcgtcataggtttccgcaaaatactcattcatatcttctgtggcaggcagcaggtcaaaggccgggttaatgctgaataaaatcatctcaatctccccgctttcagctgccagtttcgcaacatccggattatgggtgctcattccaatatggcggatgattcccttctggttcagctcccggacatattctataaaagggcctgtcattatctgttcaaactctgccgcctcatctacaaaatgtatcataccaagatccacatagtctgttcgcaggcgcgtcagcaaatcacaaaatgcctcttttactttttccatgtcccgggtacgcacatactgtccgtcctgccatgtggaccccagatgcccctgaataatccatcgatctcgttttccctctatagctgctccaatgttggagcgaaccttaggctctgccatccagcagtccaatatattaatcccctgcttttcacagcattctatcacttcttttacttcctcggcattatggcgctccagccattccgcacccagaccgatctcactgacctcaagaccagtatttcccaattggcggtatctcatcccgggtttcctccttcgattttacttttccttttattctactctgtctgtaccaaaactgccagcacaagttgaacagacccctgcccctctgtctgaaattacccgtttagttttgctgcgaagtcggccatggcctctgaaatctttatctgctggggacagacttcctcacagcttctgcatccgacgcaggcacccggctgtttttcttcaggaaccgccatcagagccataggggcgataaatcctcccccggtgaaacaatgctcattatataactcaagaagggaaggaatatccagttcctgaggacaatggctcgtacagtaccggcatcccgtacagggaagtgcgatatctttcaccatacgatccgccacctgaagtagggcatccatctcttttttgtccaaaggcttatgggacgcaaaggtcctgatattttcctgaagctgctcaaagctggacattcctgagagcactacagtaacctccggcaaggtctgaagaaaacggaacgcccaggcaggcatatcctcattagggcgaagttcttttaatgtgacggcatgggcttctttaagagacgccaaacggccgccccgaagaggctccataacccaaacaggaatttcatattggttcaatagctctaccttagctttggcattctggaaagaccaatccagataattcagctgtatctgacagaattccatatgttccccgtatgcttccaggaaacgcttcatcacctcacagcttccatgggcagaaaatccaagatgacggatgcggcctttttctttctgctccatcagatacgaaaaaatgccgtaagtctcattcagataagcatcaatattcatctcacagacattgtgaaacaagtaaaagtcaaaatactccacaccgcatttttcaagctgctgctcaaaaatctcttccaccttatccatattagaaagatcatatcctggaaatttggtggcaagataatagctatcccggggatagtcactcagcacttttcccataaccctttccgagttcccattgtgatatccccatgcggtgtcataatagttaataccatgttccatggcatagcttaccatctctgaaactgcacactcatcgatcctggcatcatcgccgtcaataacaggaagccgcatggcccccattcctaatgctgacaatttcaaatcctgaaaatccttatatatcattttacagtacccctttctgtgatataagttcaaatgaatgtctagtcctgaccacagccttttctttaaagtgcagtctctgtatgtagtacatccattccttagcttttctacaggatactccctggagttaactcaaagtcaagtacttttatacatgtttcgctaacatgtatgttcatgtgtatgacgctgtatagggccaccgccgttcaaatcaacataagccaccgaaccgtctatgatctgtcccatttctccaaacagcctttttgctttaaagttcacatgatttggaggtgttataaattcattcatcttccaattctcctttctcccgacttttctaatatcacagtatcttctacgactcccctgaaatctcggtaatatcatacaaatcatcaaatgaaatcttagtatttacaatttttagtactcttgccgtctcatcaattctggataccatccctgtcagtttgatatattcattttgacagaaatatacaactgttataatgtcatttttatgcacctgcctcagttttcgatccagctcttcctgatagtcttccgacagctttccctttggcagcactaccttttctttcctgcgcagggcatcgggatagcctttcagggcggcaaacggcataaactgctttgccctttcctctctgctcattttagataccacttttatgccctcctatctgccggttacgctccatagcagtcgctccctcctgaaggttcatgccttttagaatcgcattcttcccatatttttctttgatgttaagcatagcttcctgcattttatgttcccgctccagctctgccggatccgtaaacaagtcatactgctgatacctctcgtccaccacatggttgaaagtaagatttatcctgtgaatgggtgcagaccgatccacaatccgctcgtacagcttcattgcagatgcgattatctgctttgcggaactggttgtaactgtcatagaagctgtcccatgtgcggatttcttctgtaaccggctgctgtatcccacatgcagggtaatggaatccgtcacaagccctttatccacaagctccagagagagcatatcagccatttccttcacaaccagtatggcatcctgataggtatagtcacagggaagcacctgtccgcttgatatacagttctcttttgtccgatacgctttgatgtcagccatggtaacgggttcccgcccccatgcatgatctatgagaagctccgcgtcaaccccgaacattttgtacagcatggcctcatcggcctttgccgcctgctccatggtaaagataccagcccgctttagccggtttgctatccctgtcccgattctccaaaagtccgtaagcggcctgtgggtccataaagtctcccggtatatcacctcatctaaaaccccgatgtgatcctccgcatgctttgccgtgatatccagggcaatcttggccagataaaggttgctgccgattcccgcagttgcagtaatccctgtggtgtccaatatatcctgcataatctttatgctcagttcctttgccgtcatctggtacatagacaaatagtctgtaacatccataaaaacctcatcaatagaataaatatgaatatcctcttttgcgatgtacttcagataaatgccgtagatctcggcagaataatcaatatagagctgcattctgggcggtgccatgatatagtcaattcctgccggaatctgaaatactctgcatctgcccggtacacccagagctttcatagcgggtgagactgcaaggcagattgtcttttccgtacgctccggatccgccaccacaagttgggccttcataggatccagccctctctccacgcattctaccgaggcataaaaggacttcaaatcaatacatacgtagattctgttctctgtcactgatggacgcctgctttccttcttaattttcttcactgataccattttaccagaacaggagtttgttttcaactggcaaactcctcacagttctccctgtgaattcatggttactctttactcgtgcccggtaactattcatgcaggtctttggatgtcagctctataccggtgaagtataatgcatataaataaatttttatatataaaaaaatttagccaatcttttttacaaatataaaacccaaagtactgtacagagcatccaatattcctcttaccacctgtcctcgattccggcaataaaaaaagtgcgcaggcatctaaatcagcctttgcaccttttaatgaaaatttgtaatctgttttatccacaggcttgaacagggtacttctgaaagattactgaggctgtgctttttcctggaatctacataaaaagcatcgcccttatgaagcacaaactgctgttcatccagagatatcgtcaattctccttctaacacgaatccgatctcatcataagcatgggtccattccttcttatattcgcagcggggctccacaacaatcagaagtccgtccagtctctccgggccaaaattgatggattcatagcgaatctggcccttctgctcaaaaacaacttttctgtcctgagcacgaattacattctccccccaattcttatcatccagcaatttcacaagttctatatctaatgcggcgcagatacgctgaatattatcaagcgtaggactgcagagatttctttccagattactgataaaagcaggggaaagcccagtctcatgtcccagctctgtgagtgtcactccccgccttttgcgcagattccgcacccttgttcctatcccttctcccataaacctgttctccttttgtatctgtatttttataccgacgacaaaatcatatcatttttcacaaatacattacaagtataattttttacgattgtaaaaaaatctgttgactttaattgagactgcattttataatacacctaatcataaaaaaaattttatatttataaaattttaaggagggtttttatgcagcgccaaagtccaagtatttttaatgatattgtcggccccactatgattgggccttccagctcgcacacctgcgggccttcacgcattggttttctggcacagcagcttcttccgggaactttgaaaaaggctactgtggctttcgctagagaaggagcttacactatgatgtacaaggggcagcgctctgatatggggtatgtgaatggtctactgggcagacgtcctgaggatcccaggcttcgcaatgcatttggggaagctgaaaaagctggtgtggaagtccgtttcgaaatacaggattttcctgctattgtacccaatatttcacatatcactttggaaaattcagaaggaaaacaggttattgtacattccgattccaccgggggaggcactgtaaaactgttaaaaattgatgacttcgacgtatccatcacaggggactgctacgaactcattgtgagagcagattgcgatactgctgagcttgggcacatctgcacctacatacaggcattgaatgacagggatgaaggaagcagcatatccgcccgcgaagaacgcgggctgattaatctgaaataccggactccgttaaaggaacaggttctggagcaaattaaaaaaataccctctgtctctgaagtcattatgatggagcctgtcctggccgttccttctaaccggcactgcaaactcccatttgcaagtgcagaggaaatgttagcattatcacgctccgagggcaaggagctgtgggaactggctgtggagtacgaaatggtccgcagcggctggagcaggcagcaggtatgggattatatgaaatatgttgtggataccatggaacacagtgcaaaagaggccctgaagggcgagattgatatgcgcggtatcatctcccccactgcaggcaatgttgagaactatataaaaaaagattcaaaagcgctggatatgggcgtattaaacacagccgttccctgggccatggctactatggaatacagcagcgccatgggagttgttctctgtgcccccaccgggggttcagccggagtcttccccggagctgtgctgggcgttgccaaccatctgggactctccacagaagaaaaaatccgtgctatgtttgttacatccatcataggtattgtcatgagcaaagattgtaattactctgcggaattatacggctgccaggttgaaccgggagccgcttccggtatggctgcagccggactggtatacattatgggcggtacctccgaacagatgtgtcaggccgcatcctgtgccgtacagaatattcttggcaccatatgtgatccggtagcgggattagtgcagatcccatgcattaaccgaaatgccatgtccgcggcaaacgccgtggtatccgctaatatgattctgggcggttttaatcccctgattcctctggatcagactgcggagacactatttcgcgtaggacggcaattaccctctgaattgcgttgtacctgccatggcggattatgcacgactccctgcggtcagcagttagccgcagagcaagaagcccgggataatgacagagcgtaagacaccgctccggcacttatcttctgcagctatagtttacctgcaaaaaccagtatacaccattattttctcacccttagtatcacattttccattgaactgaaacccaagctgcttatacaggtgtattgcagccgtattgctctcatatacgctcagatacacctgtttttttccatattcttggtgcagccgtttcagcaaagccgagacggcctcccttccataccccctgccctgatgttttccatctatcaggatacgatccagccatacttcaccctcccgtttagaaatttggaagcagccatacatagcaaaccctaccagcatattaccgtcatagatacccaccggcctccactttgggctctcgtccgcctctttcatacaatcactgacactctcaataaacccggtctgttccggtaaagtccgtaagctctccacatctcttctgattgccggattaaccggcacaaaatgtaaattcatagtcatacacctgttctctctctttgttttcatatctctgttcaaaatagtgcggattccaggcccgtcacctgcccctaaacaaaaaaaccggacaaaacagagtcacttccggccgccttatgatgaagttgtacgcaaaatcatcttagcagccagtttgatcaaactgttttatccggatcattgcaggtacgcccgcattccgtatctctatactaacagacagcaggattttcgtcaataatgttccgccttttagacacggtgcctgaatatgcttatccgtaacaattttgtttttatcacatacactttattaaaaagaggaaatatatatgtgttataacgagtgtcactgcagttccggcaaaccgcaggaactgtgttcctatgcacagtatggagtccaatctaacccgtcttctaatactgatctgtccatgatgactctgttccaagagggtaaacagatatctttaatggatactaaaataatattagaaccaggatatttatatctcatagattttatttttttagcaacaccagaggctgatagttttatgcagattactcctaaaataaacggatcccttaagctattatactcattttttgctccaaccggctctgcgtcacgtaatgcttctgcatccggaagtttcaccatccccgtcatcgaagacagcgctgcagtatccttcaatctgacgtatccggaatctgtcagaaatatagatataaccggcgccatatcggttactgctctgcacaagattacaggaagcaaatgccgctaacgtaacctgtaccagcggtctttctatatgaaaaagttttccgcagatgatgcgtccttactgtcaaaacaattgctgccaaaatcagcacgcttttcatctgcggggaatcgcctgtacaatatgccggcctcgtacgccccaagcacaccgtttatcccactgcgctcattgcagataagcgtctcagcctcccgccacttctccggcagggcaaacgccgcttcctcacagctaaagttcgcatacaccagtattttgccgccctcacagctcctcgtatacgcaaaaatccgctcatcgtccttttcaagcagttcaaactcgccgtctacaaacaccggatatttctttctcaatctaattagtttcttatagcagtagtataccgaattctcatcctccatctgctgttttacattgacctccgtataatcaggattcacctttatccaaggaattccacagctaaatccggcattcattccgtcgttccactgcattggtgttctggcattgtcccggcttctggcatggatggaatccataatatccgctttggaaaaaccctttgccagccgttctttatacatgttgatcgtctctatgtcccggtattccccgtactcatactgtacatttttcatgccaatctcttcaccctgatagatgtaaggtgttccctgcattccgtgaagcacaatggcaagcattttcgcggactggctgcggtacaccccgtcattcccccaacgggagattattctcggcaagtcatggttttcccagaacaggctgttccagccgcatccgtacagtcctgtctgccatttctccataatttccttgaatttaaccagtgaaaatggtgcaagatcccacttctcttttccctcctgctggtcgattcccatgtgttcgaactgaaataccatggaaaactcgcttccgtccggattgctgtagagctttgcccgctccacatctgcgccccaggcctcccctacggtaatcagattacccttccggaaagtctcacggctcagttcacggataaattcatgaagtctcggcccatttcctgttatcaggtaatccggctccttggctatttgatcgataacatcgagccgaaatccccctaccccttttttcatccaccagagaatcatgtcatagatctcctgtcgcacctgcggattctcccaatttaaatccggctgttttacagagaactggtggaagtaatactgagaaagctctggcacccactcccatgctgagccgccgaaggccgcctgcatctcgttgggaggctgactttttacaccgtcacgccatacataatagtcatgatacgggttatccctgccctttcgcgcttccctgaaccaaaagtgctcatctgacgtatggttgagcaccagatccaaaaggattttaataccccgttttccggcctcggcgatcagctcctccatatccgcaagcgtcccgaacataggatcaatatcctgataatccgagatgtcatatccattatcatcctggggagaacggcacaccggggaaagccatacggcatcgataccaagatcggccagatagtccaatttgctgatgattccctgcagatctccgattccgtctccgtcactgtctttaaaactgcgggggtatatctgatagattaccgcccgcttccaccagtctttttctaatgctgctgtcactgtacgaactgttgtcattgcacttgctcctctctgctgcatctcttcgcccacacaaatccatgtgccggaagccagacatccctcatctgccggttttctccagtaaataaatcaatgtacatgccttcctcctgcatccatgccgtcctcctctgactgctgaagttaaaaatcccaaaaaatctttcttcttctgtctccctcattatgcaaagaaccccattgtcttttacatcgtatgtatatacgtctgcatcttgggaaaataccttctccctcccgcgaatccgttcgagcctgagaagtgcctgaaatatctgcccttccaccgcagtcccgtccttacgaagcccggcaagatcccagcggaattttccacgatgcacataacgggaatccatggatttcagcggatcatctttataactgtagtcattgacctgaccaacctcatctccgctgtagagcatcggaatccccgtctgtgtcatcatgtaagcgtggagcatgatgtccaactgaaccgctgcttttagcctgacagcatcctcctcaaatcccgcactctctattccgcacatagaagctgttgttccgcagaatcttgcatcttgtgtgaccggatcatcattgtacagctcccctctgcttacgcttccacagaacctgccggtgaaataatcattcagaaaccgtttgtgcggtgcctctttcattccccaccattttaaagtatcatagtcaagtccccagcctatatcatcgtgacaccttagatagttcaaaaaggtatattctttgggcagactgttgacggtatccaactgctttctcaaaagccggatatcaccgaccgccacactgttccatgtagtagccatcgtggtcacattatacagcatatggcactccggtttttctactgttccaaaatacggtactaccttttccggttccatcacaacctcacccagcaaaataacgctggggcagacgatctcgctgatgatacgcatcatgcgcactatcgtatgcacctggggaaggttacggcaggcagtccccagttccttccagatatatggaaccgcatcaatgcgcaccacatcaataccgcagtttgccagatatagaaaattgtacatcatttcattgaacactcttgagttgcggtagttcaaatcccactgataaggataaaatgtcgtcagcacatgggcattttgctccgggagataggtaaagttacccggcgcggtagtcggaaacacctggggtactgtccgttcatactgtctcggtatctcatagctgtcgtaaaaaaagtagcggctcctatattccccatccccttgtctggctcttattgcccactcgtgatcctcggacgtatgattcataacaaaatccatacatacgtttattccctttgcatggcacgcatcggtaagttcggtcagatcttgcatcgtgccaagctccggtctcaccttccggaaatcagccaccgcatatcccccgtccgaacgccccgctggtgtgtcaaggaacggcatcaggtgcaggcagttcacattacattctttcagatagtcaagctttccctgcaccccctttaaattgcctgcaaaattatcaatgtatagcatcatgccaagcatatggggttttttgaaccaatccggctcgcaaagccgcctttcgtcacgattgtggagtttctgactgcgcattttataatattcgtacatctgtgtgcacagctctgcgaacatatccccattttggtacagctccatatagagccagcgcagctcgtcatggtgctttgccattctgttttgaaaaatatcttcttttttccccattgcttcactccctgcctgtttccgcctggaatagctgttccacagggccgcttatccccctttccaagccataaaccacattacttaccacatactgcccctggttcacgaacacctcaattagattaggctctgcaaagatatcaagctcataccgtccgcaaagggggggcgtactgcttgtcatgcggtactgctctgcctcttttgtatccctgccgtaatcttttcttgcaaatactctgcgtctgtctgtgtgaatgcaatcgttctcagctttgatacagtatccgccgatatccagcatatctccttcttttaacacggtttttatccgaaagggcttctgataatctatctcttccctttgcagcactactttactaaaatactgctctgtctctgggtgcacgcggaaataaatgtgccccgcctcttcttccactaccctcggaagacacatcatgcccttccatggattcctgtccggtgcatcgactgcataaggcatccgcatccacgcaatcatgacccgcctgccatctttatcaagagtcgtctggggtgcgtacaaatccagtccgtaatccacaaattgactgggttgtaacagttcaagctcacagctttcctcctcaaaatccaccggtacacatatggattgatgggcatattccagaccatcttccagaatacccataggagaaccaataaacacatagccttctcccgccatgaaaatatcaggacattccagtattttcccgaaggcttcgtcccggcactggttcacataggtccatgtcccggcatctctgctcttgtagaacagcacccgtccatacttcccttcaaaggtgctccccagaatcatataataagtatcgccgcttttccacaccttcggatctctcgtatggacagcatcagcgattgccatatctgtacttaccggaataatctgccgtttatccccccagttgtcgaactggtacccatccggagaaatcatcatcgcctgactggtttcgaacgtttctcccggacacagatgtatgttttccggatcttccttcaaataccgcaccgccgaataatacagatacagcattccgtctttttctatggcactgcctgaaaataccccgtttctgtcatagtccttcgtagggaagagggcaacctccttatgctcccagtaaaccaagtcatcactgaccgcatgtccccaatgcattgtcccccacacaggagcgtaggggaaatgctgatagaacaggtgatattttccttgataatagataaagccattagcgtcatttatccagtttcccggagccttaagatgtaatatatcttttatcattccactaccttttctttcctcgtgttatttattttaccgcccccgcaacaacgccgctgataatctgcttttgaagtataatatacagaatcagaatcggtattacgcacaacagaagaccggccataattgttccgtaatccgcagagtacgtgccgtagaagctgtaggtcgaaagcggcagcgtcagaagctttttatctgtcagcactaacgacggaagcagaaagtcattccagaaggccagcgcatttaagattaccatcgtagagataattggcttaagcagcgggaacacaattttaaaaaatgtctgccctcgggtacagccgtctatgtaagcagcctcctccagtgcgatgggcacactgcccttgataaaaccatggaacataaataccgacatcgccatagaaaatcctgtgtgcataaatatcaaggtaattctgtgattcagcatattcaaggttcccccgtaaatgctgaccagcggaatcataatcgcctgaaacggtataatcatagatgccaccatcagtgcgaacgtaattttggaaatcgtattgttgtgacgcacgatataatatgccagcatggctgcgaacaaagtcacaaggagtgtcgccgaaacggttacaatcaaagagttcttaaaggcattcataaagtccatctgtgtaaatgctttaacaaaattgtcaaaggacagtcccttaattgtatacagccaggaaaacgggcttttaataatatctctcttctgctttaaagagttgattactaccatcaggaacgggaacatataggcaagaaatataattatcaatccccctgcagccagtatattagtcgcttttcttttatttcccccgattgacgtctgcttcattatgcttccacctccttcttcttcgtcaggtacacctgaataccgctgatacatgccacaatcagaaacagaataagcgcctctgcctgccccaggccaaactgtctggaggtgaatgctttctcatacacatgcatggcggccatttctgtcgttccgtaaggcgctcctgcagtcaatgaaaggtttacatcgtataccataaatgcacgagacagtgtgaggaagagacagattgtcaccgatgacatcataagcggcataacgatactcttcatctttctccagccggaagctccgtcgatgctggccgcttccataacatcctcgctaagtcccataaatcctgccacataaataagaatcatatatccggacagctgccacacggatacgagcaccagtgcgaggaaagcttttgtgggatcagagagccacgataccccgaaaaggttccagccggtagcctcgccgacatttacaaacactctggaaaatacaaactgccatatatatcccagcacaatacctccgattaagttaggagtaaaaaatcccgctctgaaaaagttctggcctttcattccccgtgtcagaagataagccagcaaaaaggcaattacattgactaagagaacaaccagtattacatatttgaacgtcagccccaaagaagtccagaactgcccatcctgcaaaacccccataaaattcttaaaaccgataaaattctttgctttagaaacaccattccagtctgtcagcgtaaggtataccccgtaaataaaggggataattaccacagcaaagaagcaaaacatacccggcagtgcaaacatacagaaatcttttcctctatttttatttctcattcttttcccttctttcctacttctgttctttccaatactctgcgatagattctgtcagttcctccctgtcgcttctcccggccagatatttctgcattgccccacccagcactgcccagtgatcgttcggtacgatggccgatgcattatatgtctcaccggcctgcaccttctcataaatgtctgcactcaacggatccgttggctcatatggattatttataaaaggggggatcacattgcaggtctttacaagcatctgctgtccaatctcagaaaatacaatccagtttaaaaactcccgggccgcagcctgctccttctccgacgctatttgtccgtccagcatcacctgcttcgacggagatgcctgaatcttcttatttacaaagtcatcagcatcgctgtttaagaaatatggaaggaagccgtactcctcttcctccccggctcctgcttcggtaagattgggccatgcccagtttccgttgaaccagaatgccgtcttgccatcagctaaatctattgccatctcatcgtagtcggctcccagcggatcgccttttgccacattatattttttcaatacatcgaacatatccagaaactcttccagtctgtcatatgtgtcaagattacattctccgtccttaatttgttgaatcacctcctgtgccccttctgaagtaccgtcataggtctcatagatatactgcagatggtgcgctccaagcgaccagtcttccttcgcaagcgatacaggcttctcaattccggcagcttttagcttttcaagaagttctacaaagttatctagtgtaccaatggacttgggatcaaattcctcacccagtgcctcttcaatcactgctttgttgtaaatcagccctcttccctcaatacatagaggaaagctgtagacttttccattaacctctgtcagatattctccggcctgggcagtccatgcttcccctgtcaaatctgcggccttttcctctgccaatgcaattacatccgtggtatccagaatcgccattgtaggcggtgttccagaattatacatgctgaccaccttagtgtagggcgaatcaccgtctgtcaccggcataacttccacatgcactttagacttctcttcaaatacagcagacatcttctccagcggagcctgtatctctgcctttgaattcagaagtgtaatctctgttccctctaacgacgcatcatatgtaaatgtatctgtagatgtgtcaatcggtacctcctttacttcttcgtttggatcgtccgggtcacttgcaaatccgaaccggcagccagacagtgttgtcaccgccagcgctgctgcaagaacccctgctatcccttttgcccttactttctttttcatccagtaaatcctcctaatctcccgctacgccatatacccggctttggtacttccatttacgagctttgattaaccggtaaagtaaccggttacttttgtaactccagcatagcatagatatacttcatagtcaatcaccaagctaattttcagcaataatatacggtatggactattcaaaattgtagatatgttacaaaatcggttacttaaccgattacttgttgccctggtatttgatttttgctatacttgtacatagaattacattataaagaaagcagcgtgataactatggcccagaaaaagagagtcacatttgacgatattgcaaaatataccaacttttccaaaacaacgatctcccgctactttaataatccggattccctgacgctggagaaccagcagatcatctctgatgcgctggtgaagctggattacaaagagaataaggtggcccgcatcctcgccagcgggaagactgagtttatcggcatcattgtgccaaacctgtaccttcgctattactctgagatgctggatcagatactctccacctatgagacctttggctataaattcttagtcttcatcggcaacggcaatgaggagagcgagcggcgctacattcaggagctgctctcctatcagatagaaggaatgatcatcctaagccacaccattccctcccatgagctggccagactttctattccaattgtgacaattgagcgagaggatcgttttgtatgcagcgtcaacaccgacaattatatgggtgctgtacaggccacaagtctccttgccaggcacaagtgcgatgtacttattcacataaattccccaactccagaagaacgcccggcctacggacgtatccagggcttccgggatttctgcaaggaacatcacttgaagcatcaggtcatcatcgaagatctgggaagcacccacgaaagcagccaacgtcatatgaaccacattttaaaccagattgaaatggactacccggatcagaaaaaaggcatctttgtatcaagtgatacttatgccaatgtccttctcaacctgctgtttcgtaagtacggtactctgccgcaggattacctgattatcggttttgacaattctcccgtatctgaagaagctattatcccgatcagcaccgtcgggcagcaaatagaaaaactggcgtacgaggctgtcagtatgctcgtcacgcagatgaatgagcgcaaaaagagacggcccgttcctttgaaagaaccaattcataagatggtaacacctatccttatccgccgcgaaaccacggaaggattactagaatagcaataaaagctcccggatgttccgggagcttttattgctattcatgaatttattcataatatgttcctgtctgataatggggagtaaactctagattatagccatcaagagacaatttgctgtcactgaaatatacatctaccgtagctacttgctccggtttccatgattccacctgactggcattgccactggcaataatactcccatctccatctaacacatttacatccgcatagaagtattcaaaagtacgatctgtcgtattcttcattgtcattttataagtcttataaccccactcgtcttcagtagtatcgattgtaaacccttccgtcatcctctgaatgttttctcttacagattgctgttccgctgcagatgaagcatctaccaatatatcttctactgtttcctgatgcttctcatctactttcaagccataatcttcaataaacttctgcaacagcattgaacgttttgcatagacatctgtccattgagtataatatgtattataatctactgtataatgctttgtagcctctttggctgcacgtacataatcaatgtatgtacgaacatcatcttgcaagtcggcattgtcaaaggttttgtcatagtatggttcaatttctgccaattcaatatcacaatattcgctgaatatatccggatcttcataccccttaccctgctttgtgtattcatcggatttatcccaacgattcattagtcccttagacatagcacgcatatactgtccgtctacagataattcatacttgcatttctcaaccatttctttgcaatcttcataatcgccaagagcagcaaatttttcgcttgcttcctcaaatctttcatcctcataaagctcaaccgccgctttataatttcttgcatccgcagtcattatataatagcctgcaatacaagcgataacaagaaccactataactgcacctatggcaattatcttcttcgaaaaatgtttcacttccacagaaaatctaaatcatcatcaataataattctcctctgctcctgtatctgcaaagaagaaaccaatcaatatctcaggatatattattgtttctacatccttaatgtattttgtattcggatgaagctttttaaacaaactaataatatactctgggtttgccgaactgagtttgtaaccgcggtaataaatatcccgttcttgattatagaattctatggcgtcacagatattgttattatcataatatataaaatagtctccataatcatcagtctttgcttcccctcccttatagaatgtagtataagttccttttattaaagagtggatctcatcttcagttatccccacatatggcaattctttaaaccttttatataacttaatttcgtacttttgtacaacctcccctatttttataccgaccgagtttgaggagtacttttgtcactattgacaataagcaacgaacgtattataattatcgttatataacattaattataattaggggggtgtattaagtgccaccaaaggcaaaaattacaagagatatgattattgacgcagcatttgagatcgcacgaaatgatggtgctgaaactatcaatgctcgaactgtatcaaaaagattgaattgttccactcaacctgttatgtatcatttcaaaacaatagaggaattgaaaaaagctgtatacgtcaagacagatgaatttcactcggcatacatcgctgatattcaaggaaagtcccctatgaaaagtatcgggctgcagtatatccgttttggagcaaaagaaaagcacctatttcggtttctgtttcaaactaatgaattttcgggaaaaagtgtttctgatttaacaagtgccgaagaagccgagccgatttttgctgtcatagcaaagacaagaaatatccccatggaacaagcgcgagttatcttcaaatccttatttttgtttgctcatggatatgccagtatgttcgcaaacaacgatatggaatacgatgaagaaaccattttatcggatttagatttaatatttgatggtacgctatatgcgttaaaaggaggaatatagagtgtatcgtttatataagaaaaatgtattgaacttttctttggcgtggattattgcctatgttgttttacttagtgctgctgacagcttatcggtttcgctcggttttgaaaagataatcaccgcacctgtgagtatggtctttgccctgcttatgttcggttttattaaaaagcacaacttatccgaacaatacggcttatgttctttcatggggagcctaaaaaattatttatactttattccgcttggtttgatgataagcgttaatttgtggaatggcgttacaatgaatgtttctgtattggagaccgttctatttattctgagtatgctttgtgtaggatttattgaggaagttatcttccgtggttttcttttcaaagcgatgtgtaaggacaatataaggttagcgatttttgtttcaagtattacctttggcctggggcatattgtaaacttgctgaacggcagagagttgttacccacgcttttacaaatctgctatgcaaccgcaataggctttttatttacgattattttctataaaggaaaaagccttttgccgtgtatcattacacatagcattttcaattcaatagctatctttgctgttcaaagaacgcaaatgttcagtatcatcacctccattctattatgcgttatttctctcggatatgcgttatggatattgaaaagagctgaaaagtctgcttaatttgacctcttatccatgtcaagtgcgataaatcctgccgtaactgccagtgcaagcataatgtcatgttctccaaagggatttatcactatggaatacaacaaaaatgctgtacaaatcagtaatacggctactacaatcctacgcaaaatttttttattcatctgcaagccccctccctttcaatttacataaattcccatctttttccgcttctttgcaatcatcataataaacgccagtgaaaggacatttgacagaacgatccgcagaatactcaattcgtccgcaccggtctgcgtaactatatgaagggaattcgttatgaaattattaaaaaaatgttcaaacattcccgcccagatggttcctgtcaatgcagcacacatgccccactcatatcccagaattcctgcaagcaggatatatcctgccgccatcaccacggctgttggtatattcatacttccatccagcacccagaccaccaccatcaccacatgccatagtccaaatagcaatgcctgaatcagattacttattttctccggatatacagtctttcccatctgcagaaacaatccgcggaacaaaccttcttctgccagcacattcagaatatttcctgcgatacagatggataccgtagcgaaggatagtcctgtaacattctgactggtcaatgcaaaattggaaatgtaaaaatgtagtccaggctgtcttcccatggccattaatatcatgtattctacgccataggaaatagcaaaagaactaacccctaaagataatcccagcacagcgctgcctaaaatgccttttctacgaaatcccagccaacaaagatttttccctgacaaataaagtatgactccaatcaatgcaatggcaaacagcttacagagaacattttcagctaaaatcgtctggtctgtcctgataaataggaattctacatactccgctatactgcataataaaaaaacacatagaatgccccataggattttcctctgcttcatttgctgcctccgccctggtactgcttcttcagcgcttcaaatccatccgtgagaaaactgctgattgcctcctcgtttaaatccacgtaggaagtggcaaccatagaggcaatgccgtgaatgtaaaacaccatctctgtctgaaaacggtacgctgtttcataatccagtccagtttctgaggaaagcagttgaatgatgtcatgcatctctgcttttccgtcactttcctgttccttggagcggtcgcgcataaaaagtaatcgaaacaactctctttcctcttttgcgaatcggatataggtcatcccgattcccttgtagggcggatacattcctttttccatgtcctcctgtacacagctttgatacaccgctctggctgctttcaatacttcctgctgtacctcttccatattttgaaatactgtaaaaatgggacttgcggagcttccaagctgcgcactcagagttctggctgacaatgcttgtgcaccgctgcttttaataatatgtagtgcggcctgtatgatttcctctctggaaaactttgcttttggcggcatgttcttcccctcctgctttactttcatctttctaatacacatgtattaaaacacctgtatttattatagaaagaacgtctcatactgtcaagagggttttctgttttacaatccaagactggaaagccaccctgctagcttctgctccctgcttttcaagtctcccgtttccccttgatattttcccagatgcttttcacctgctatgacgccatccatcatgtacagcacccgctgtgttttcgccgctacctttacatcatgggtaacaagaaggatagttgtacccttttcatttattttcagcagtatattcataatctcttcggcagcttttgagttaagcgccccggtaggctcatctccgaaaagaatttccggctggttcatcagcgcccggcagatggatgcccgttgaagctggccgccggatgcctgtgtaatatgatggtccgccaactgcaaaattcctgtctgttccatgagctttttgccccggtccttgatttcctgctttgtttccctctttgagaggcaggcggacaggagaatgttgtcaaataaattcaggtttttcagaaggttgctctgctggaaaacaaagcccatcctatgcaggcggatttctgccagctcgtcctctgacaatgcagaaaaatccatatcacaaaacctgacgcttccctgtgttgccctgtccataccgctgatggcatataaaagggtggatttccctgagccggagggtcccatgacagagataaattctcctttttctacagctatactgacatcgtgcagcaccctatgtctgttgtttttccccatttcatattctttggtgagatgttttacttccagtattgtattcatattaacctcatttctgcttttcttttaatgaatatagttttattccaatcttggaaaaaaggtgcttgctctattttgctgccagcatggcgtggatactctgaatcgtctgcctgcacagaatcatggctgcggctactgccagcatcaatgacagagggcataaaagccaggtatacataggatttaccacaaatgttatatccgagattcctgatataagcagtcctgccagcttctcacccagcaggttcgccgccagtatcccaaaagccactcctgctgccaggagtaagactgcacgggtaaggtattgcttcatgatatgattgactgtaaaccccaggcttttcatcactgcagtctgtctggcctcctttgtcatgagcatcttgaaaaacatgcctgttatcagggctgccacagcaagagaaagtacaaaagcggatttcgccaccaaacgcagctgatcgagcaccccgcccagcgtttgatccacatattccgttacatccgttaccttcgccggatggaatattttactgtattccaatctcttttcctcccgggaacccccctccttcaggttgatattcaccgtgaaccatatcacttgttccatttccataggaagaatagctttcgctgtttttcccccgttggtgacgtcctgatagataccggatacagtcatctggcgttcctcgcctcccgcaaccagaatcagactgtctcccggttccttctgatactcttttgcattcatggttgacagcgcaatttcattttccttctgtggtgcagagccttttgtatactccagagggaattggttaaaatctccgatttccaccttcatattgtcgtatgtaccctcactgttcgacaccttaaaagtgcaggtaaacaaagccgaatacttggaaacatccccatcctttttcaaatattcttccgtttccttatatcttgcaataatatccggcgtatgctgcaggtcaagacggagatcgcattttcccgcacccatgtaggtgacaaagtttggtgactctaaggtgtctagaaggttaacgggaacgatcatcaaaaaggtgcagagaacaaacacaaagcatagaagcccgtatatccggaagtgctccaatacctccttcactccgagaaacatgtttacatcttttatccggctgtgggagagagtatattttcctgtccttgatcctttgtccggtgccatgccaagacgcagtgcctccagtgcggaaatctggcggaaacggcgcagaatcaccatacaaaagataataattgcaacaaaaacaattccagcgcctgtaacaggaagcagccagttccatatggtctgctttccttttcccatgtacagagaaatatttgctgtaaacaagtttcctgcaaacagagatagcaaataacccagcacacaggcaaaagcagagatagccgtgtatttcaccatataaagtttcctgatattctgatttgaaatccctatggccttcattacaccaatttcccggtaatcctcctctatggtggtgagcatggtaaaacgcaggcaaagcgcggcaatcaagaccagcagacaggcaatgaagataatgacagatgcggcgatcccgtccgacattccattaatcaccttcaccaggtaatagcccattgccgtacccttttggggcatattggaatcctggtaaagtgtttccagctcctgtatcctggacatatcatgaagctgaaattcaattaaatattcaatttcacctaaatgttcatgcaaaagttcccaatctccgtcactgacgagaaaacgcttggaatttatcatggaggggttcatcaggctgtcacgtaaaaacgctacaatggtaaaatccttagcaaaatctccatccaccacctgcactttgtccccgggatgcagattgtatcgctgcatatgatagattggtactgctatttccccatcggatacctgtaatacctgattatctgtatccaaaagatagtcaaactgctgattctgcctgacaaaggagttttccatcaagctgtcagcctctgattgctcccggcctcctatgtaaatattggccccattgattcccaaaagctcaacggtctgctgtgccttaacaagactgcggttttcccttacaaaattgtccagttccgtctgttccacttctcctgcatggagctgtgagaagtgagccacatccgcactcgcaagcagtgtatccatggaacctgacagcgtaaggataatcgtaattgcacctgacaccaacattgcagccagaataaaaaatccgcataaggaggcggtaattatccggtttctctttaaatcattttttaacatgtgaagcatcataagtcagccctgccttcctgtgtacaaaattatactggtgttttttatatgatatacgtctttagaccgtctgtctgtcggtagctgtgtaaaaaacaaagagactttttgtccccttatttttcgctatccagaaaaagaggaagtattgcttcctgcatactgccccgctccatccccagaagccgttctaaattgtagataaatgcctctatttttattcgttttatttccccatcattctgggcaaggtcatcaaataccgtattggaatacagcagagtcatttccaccacttccgctggataatccgtgtgacatatcccctgttctatggcttcttctatcaactctgtaaccagaggattaacttccgcaagcaggctttcctgcagcttctggtgcaataatgcattctgaggcttatgtacctgctccagaatcacacttccagcaggactctctacattgagtgcacgtacagccagtgtaaggcgctgcagaaccggcacttctttttgaaggacaatactttttgccttagaaattaaccggtctgtgatacggtcaatcatggcgttcagaatgtcttcttttgacttaaagtgatagtatagggtccctctggcaattccaacctcattcaaaatatcattggtactggtatggtcaaaaccttttgtcccaaacaatctctctgccacatccagtatttcatttctgcgttccttcgcgtcttttaccatgcgcattacttctaccaccgtttcattacaaatttgtataccgacaatctgtcgataatactttatcatgaatacacatgcatgtcaatttaatccgccacaacttcgctgccccagctgctaaaatttatgattccccgggctgtttttctgtatcaatataatattctttcgtcaaatccaaaaagaggtttataacaggattgttattattaggattcaccacacacacataggcatccgtatattcggagtcaaacttgatagaatgataatgcggattattcaacgatgtgggatcatatggatttgaaatcgtaagtccattttctgacaacaccttaaaatatgcaatttccgacgaaggtacttcgacctgatgtacatctgcgagatcaaaacggcctttgaatattttattcacctgatagccattgggccctgtaaaataaaatgtttcccctgcaagatcatgatattccagtgactgtttgcctgacagcctgtgatgtgacgacataacaataagagcatctacttttttcagctgcttaacatcaaatcccaattcatgccaatgagggaaatcaaggcccattgcaatgtctatgcttccattagtcagccctttgatctgctcccaggaaaacaatttgctgcactgtatttgcaatgacgggaagtcttcacggagtttattgattattgacaaaaaaatatactctgcataatatcccgcctgaaaagagattgataaagaaccgctcttcccttctgtagccatctctgccattcttagggcatagtccatctgtaaaagcgcttctttcacaccatcgtacagtatctgtccaggctttgtaagacgcagaggtttgctgtttcgattgaaaagtgcataccccaattcgtcctccaacatctgtatctgtcggctgattgtcggctgagatgtgtaagcctgtcttgccgagtgagtaaaattcccggtttcggcaacggaaataaaatacttgagctgtaataaagtcataacaacctccacagggtattcctatactcgtatccttgaaaatccattttcactatagcacacaaacagggcatctgcaataagatgccctgtttgtgattctggttcgaagttattgatttcccagcttcttacaatgctcaacagaagtttttacaaactcttcatacattgcatcaaaacccatagattcgattttttccaaagcagttacggtagcccctcccgggagcctgagggcagtttcaagatctttcagactaatatcggaagaaagaatcatctccgcgctccccttcattgtctgggcaaataaccggattgccgtatcaggattcaatccgtatttttcagcctcttttaccattaagttagaaatatgatagaagaatcccggagccgaaccattgaacggaagaatctctgccatcatgccatccggaatctcctctacgatgccggataatctgaggatagacgtgaccttctctacatcttcatctgtacagtttgcattacgcgataccgcaaatgcccctgctcctacccgtgagctcatgttcggcatacagataacaactttacagtcctcacccagatgttccgtataccatggctgctcaatacccgtaacaactgtcagcattagctgtcccggcctgtagcacgccttcagctcgtcgataataagtcctgccactttaggcgtcacccccagaaccagcatttctgaatggtcaaccagatctttcatgttgtcaaatgtcgcatagcctttcgatgcatagtctttgcgggtatcttcattgatatcatagataccgatttcagccggattataatcctcattaagctctgctcctgtgtgcattgcacgaataatgtttcctgcggcaataaaaccataacgtaacataattgtttccacctttcttaaatgatcgttttaatatatttatttgtaatactcatacaccactccatgtattcttttgaaggtgttttaacatccggcagctgatatgtaagccctagtttgcggtaagtatccgtccccaaccgatgataaggcagcagctgcaggcaatctactccaggcagttccataagaaattgccctagctgctccaaatccgtttgtgagtcattcactcccggaatcaacggtctgcgtataatcagcttcataccacttttctcagccccggctttccgtatattatgcaaaataatgtcattgggtacacccgtgtacatcatatgcgccttgggatccataagtttcaaatccacaaaagcggtgtttgtattttttaaaatcggctcaatcttactccattctccataaaaagaggtttcaatacaagtatcaatgccctcccagcatgcacggctcaccagataataagcaaattccggctgagcaaggatttctccgcctgacacggtcatccctccgcctgaatggaaataaaacggaatatcttttcggacctctgccataacttcttcaaccgtcatgacagccccataggtgatgcctccatccagggtagtctggattcctttttgatgactttccggagttgaacaccaccggcagcgcagcgggcaccctttcaaaaatacaactgtccgtaatccatctccatcataaatagaacttttttcaatccgaagcacagacccctgaagatccattttttcataactttgatatcccatttttccgccctttcaatcagccccagtttgcgatctctgtacgctggattatgtcgtcctggatatccttgcccaattctacaaagaatgcagtatatcccgcaactctcaccagcagatccttgtggtcttccggatgcttctgtgcatctatgagcacctcaggatcaataatgttgtattgggtatgatagatatccaaagtacactgtgttttaagcagaaccatcatgttagttaatccgcgctcgccttccaacagttttggatcaatcttcaagttcatctgggtcccctgggtaaaacgtgcatgcggcaaattactgatagatttcaaaagggccgtagctccatttacatccgtacctcccgtggcgccaatcccatctgcaagcggcgtccatgccttccgtccggacggaagcgctcctacactctgtccgatcggcacattgccggataccggaagcatgcccgcagtcagctttccaaagggagagtcatatttctcaatctgatctaccagataattgtagatttctcccgcacagaaatctgctttcggatcatcgttgccgtattttggcgcctccatacacatcttatgaatctcctcatatccatcgaagttggcatccaatgctttgcaaagttcatccatggacactttcctttcatcgtagacaagatatttcacatctgctacagagtttatgatatctgcctgcccgatgatattgattccatttcccacattaaattcagctcctccattggcataatctttacccacctccatacagtgcggataggtaagagaaagtgccggtaccggccggtagttctcactgagataatccagataagaattcatggttgccatcgtatgtacaaaataatctatttgctttttaactgctgtcataaaatcatcaaaagtcttgaaattgcgaggatcacctgtctgaacggacacctgttcacctgatttgcggctcttgccatttgtcataaccatatctaaaactccgcccatgctgatttccccaatatccgtgtaggattttaagcggccttccagattcgtctccacacagccgcacggagtccaatcccatgcctgtgacaatggaatcctcttattcaagagcatcttaatccctgcatcatcatgataaactgccggcatagtgcgtcccatccgaatacactctgctgcttttcttaaaaatgaatccgggtttttggagatattgtagcgcactgtcatgtttggctctttcaatgcagtatcttctgttgcctgaatcgtcatataggataaatcattcacagcatcattaccatactggtcgatgcctcctgcacagacctgaaccgtcatattataacctgcagaaaatgcagcactctcgccatcctgaaataatcccatctccgcaatcttaatccaaaaacaatccaaaagctcctgtgcatgatccggtgttaatgtaccttctgcgatgtcctttttgtaatagtcaatcaaatactgatccatacgtcccaagttataagaagacgcattttgctccataaagatacagaactcataagtaagcatactctgcagcgcctcgtagaaattacgcggaggatttgccgggacattacgattcacctcggcaatcttaagcagctcggccttacgtgtctcattcttttctcctgctgccatctgttctgccaggtctgcatgacggttagcaagtgatatgataccttcggctgtaataatcagagatttataaaaaataatctgcttcagcacatcttcgcctgctgcatcatcaagtgctgccagtttttcttctgcttccttcttaatgccattgatcccttttttcagcagtgttctccaccccggtgtgttttctccatatccgcggacaaactttttgtctacatacagcataccgctatcgcgcatggttctgacatcttccggcatcatcgcattccagcggtcaagaacacattttcccctccagtatggggcaacttcttccataaaaagcttcttgttttcttctgaaaggtaaaaagggtcgtatttacgtgtactgattgtatctaactccttctcgataacagaacaggcggaatccgggttaagaattcctgcacgcggtttgaatgcaactcctcctactaagagttcacgatcctgtatgaaaatcggtttgttttcatacaccatcttcatagctgtcgccttctgaatctgccatggctgaccttctgtcgccttgaatccctgtgttacataataagcatccagaatatccatttccacacggtgggacatataattttctctcaacgcctgtattcttttcatataagcttttgacatgatatacttctcctttataaaagtttttaataaatacgtgatccgttatttagggatcgttctgcattcactcttacccagctgttacactttaacgtccttctcttgttaaaataataacactgctgcctccagatgtgaaatatccatgtcaaatactgacatttaaaaagtgaataccctgcgagcagtactcacactgacacaaagttacttgtcgggcgcgcatcggggaacctccatggtcacatattttctatattcgcaaaatactgctcctcaaggccggatttcgccaacactgctttcaccctattttttatctcctcatccaattgcgggcgatgcgtttcgtgatattttaacagtctgttagtctcagcgtcaacactgtcccagaaataatccgcaccttttgcgctgcgggaaccgacacggggggcatatagatccataaaattatccagtgtataatctgcatctacgaaactgccgtcatggccgacttctttgatttcctcaagattcaatgtctcttcattcacttcaatcggtgtgaaggcaaatttaacctgacgcataatctcaaagtcaatcaccatcttatcaaaggatgtggcatttacactatccataacgcctccggcctccattaccaggttaatcccgtgacgatatgcagatgagaatgtcagcatagattcgtatccggcctgacagttgattaccggagcatctgtctggcatccgccgcctctggaaggcattccgtaaaatctagccatattagctccaaagccctgcatcagtgttccttccggcgctgcacatgcgaaggtaatcccgcccctcatatcggctgctgttgactggataccaaatacaaccggagttcccggacgtatcatctgtgccagcgcaattcccgccagattttccgctgtgccgcttgcgagggaacctgccatggagagggagccagtcgcccccagcattgtagccgggcataggattgccggctgtccatattcagccagcagcattaaacagtccagcattctttcatccagagacagcggtgaattagtattgatcaatgcgatcattctgggtttttcaatcagagcttctttgctgccaaagacttcacaacttgcctccataatcaacttcatctcgtcaatcatgcccgtcggcagcataatcgccttgtctgaattcagcagtgttgcgtagaacatctcgatagctgcagtctcctccggcacgtctcccggttgaatcataataccgccatttatagaataattatcgtctgcatctacaagcctcaggcatttgatataatcccccatcgttcctctgcggcggttgccatcccgatcatcgataaaagcacatccgtaggtgggggcaggattgacatggtcaccccctatcaccatatcgtatttaggatttcttgcatagatttcaaaggattccggcgccattttcacccaatgcatcacctgctcctcggtgaaatatacaatattgccttctactttaatcccattttctctgtagattttaagcgccttctcattgtggatcttcactcccacctcgctcataatttccattgctgcttcatgaatcatctgctctcttgactttgacatttcagttacctccttatggtatgttgttaacggtttctcacacctacttttaattcgtttctcaagtatgcaatgctttcctcacatgcctgccattctctggcccgcgcctcttcgattggttcatccggtctcaagaatggaatttcattttcaaaaattatacgatccatcggtgatgcttctctgatacgtttcagaattttcggcatatcaatggaacctttgccgctggatactcccacgtcatgcactcccatgggatcgaccacgatcaaatcatcactgaagtgacagcaggtagcatagggaagcatcttctccaccgcttcctccgggccctcgataacttgcagggaattcaccgtgtcaatgcaggcgcctaccagagggtgatccagctttttgattacccacagaacttcatctgcgtaagtatctgtatggttttcaatagcaatctgcaatcccagttcttccgccagaggcagcgcctccttaaactgttcatatctgactgccaactggcgcataacgtccggatgacagcgggagccatacaatactctgggacggatgatatccaaactgaattttgtcagttcacctcctatagcctttgtgatccgcagagcttcttccacagtacaatttactctggaatcactgcccgcctggaaagaagaattaaactcaaggaaaagtccacgctcctctgctgctgcctttacctcagcaagatgtgccggatccgtagactccaaatctacctttgtgacctgaagcccatccagctcccactctactgccttgtccatcaattccatcagactcataacccggggaaagaaataatcctttccaaatccccagctttctccgaatccgaagaaatgaagtgtgtaggtatgcatacccagtttaattggtctgtcacttctcttattcattgcatttcctcctttttatttagttaacttgtttacttttttctctaaaaaatttttacaggataacctgtgtgtttggattaatttccaaacacactttcatacatttttcacttcaccctttcgaatacctgctgcatatttttgcgtatcagtctgttgcacctcagttccaactccgcacattttgcagactcctcatcgatagcagattccagcatccccttgacaatcagaggattcgtccagctaaaatactctgcctcctcgtcgcttatcagtttcatattttcgatacgccgcaatatgatgaaatcacgctttctcatatcgccgtcaaaaagcaaggtgaaataatgagccgtatattcttctgaaccgcttatcgggaataactcaaaataatcctggactgcatttccaaatacggagtttctggctccccaaaatagccgataatatacatccggtctttgaaacgcatagtgatcgaacaattcccatccctctatgtagatttccagaaggttcttccctgaatccagcagttttccataattcaccatgtactcatccagaaaccggacggatgcaacggctatgagatactccagactatcaaagtgcttatacaaagctgccaccgaacatccattttcctttgcgagtttccgtactgaaatttctgatgaatcctgtatcagaagcttattataagtagataagataaatcttttcttcgtctctatccccttggaatatactgccatttgcaaactctcctcatcctgtgaacaaatcatttccttcataataatgcatttagctcaaaacatcaatattgaatttcatgacctgtactcagcaaatagaagacgcttcttagcccgctctgttttcctccgcttttaatctttttgcatatctcgtagtaatgagagctacgattacgcctaatataccgcacccaatcgcccacatccagatatagtcgtaacctttgtttccaaatttatcgatccaggagcctgcaagctttgcaaaatacacatccggcaaatagcagagagctgagattacgcccgtagcaattcctgtgtatttcagcggtattcccacttcccccagtgtggcaaaataaataccacgcatgccagaataaacaatagcaaatgcaaatgaaacagcaatgcagagaactgccacgcttttggttacaatcagtgccacacacagaatacttgataccatcagatatattcccagagttttggattttgaccctattttatcggaaataaagccgatcaggaatgtcatgattgccgcaataatataatttctgatgatagcaaacagactggcctgcgttgcagatattcctaatacacttgtagtatatgctcccagatatccacttcctgctgacgtaaaagaatagcagaaaaaaatcagcgccgatatcatccaggttccggggagttttaacactgaaactatgtttttcatgctgaatgctgcctgttctttcttcgcatcatcctcttcctccgccccgattacatcagcaggaacaaagataaacaccagcaaggtaaataacaggaaaagtcctccgcttatgaaaagcagcattttccactgcgcacctactgctgcgggatccatatctccgcttgccagagttgccttactcagcagtcccacacccacaaagccgataacagttccaaaaatacctctgacaaattctgacgtggagaaaagcctcccctgctcgttctcatctcccatctttctcgtaagtttaaggtacgccgaccagatgagaaagctcgtcccgacaccatagagaaaatgaatgatcatgatagaagtgcgccccgggacaatgccaaaccagaaggaacacagccccatcacaagtcctcccaggatgatcagccacttttccttaaatctgtctgcaaaaattcctccaaatatatagcccaccatagaaaccacgccgtataccagaccaaaatctccgataaattcattcacataatccactgaaacaaccggtttatactgtgtaaataatacaaccatctgatcatagtagctgtatctcaaaaacgtcacataaaccatcacgcctgacaacagcgcacataaaatgacgataaaccatctctttactcctgttatcttcatttgcctgtctcctcctaacccatttctgcttctccccttttctagagatgtaagctttatctgcttgcaagccaaaactaacgcgttaactttttgatttttaaaaaaccgctcactgctttctgtacgatttcatggaaatgtgagcgcgttagcttttgtgtttacatcatatggcatttattttatattgtcaagtttatattgggatgttttaattttttgtgaattatgcacagttttgttacaataatttctccatcatttttttatgcattagtgtttattagccacgatcactactatctttccgacacgaaaaaagagcctgtttcggctccaaaaaactttgaaatttgcacctatatgttttccgaacgctatgtaaaagtctggtttattttatttaataaaaatatgaaattgcacaaaatatatttaagcagcatttacatcagtaaataatttgactttttaactgatattttatatactatagtaaagaggtgatgattatgagtattagaagtgctattgaaaacacaattcccatttcccaattcaaccgtggattagccgggaaaatctttgaagaagtaaagcgccacggtgcaaaggttgtcatgaagaacaactcccctgagtgcgtccttctttctccggaagagtatatccgccttctagatgaggtaaatgatgcaaggctcttagccaccgccacacaacgcatgtctgcttttaatccctccgccgttatctcccaggaacaggtggaccgggaatttggattcatccctgctgactatgaagaaacggatggcattgaatttgaatgagctgggatgtcaaataccttcctgaagcccttgaagacctccgcaaactggatggcagccagaaaatcctaattcgaaaagcgattcaaaaagtctgccaaaatccattgccagaaaccgaaggcggctacggaaaactcctgggaaacaaaaataacaccaatctttccggcttcttaaagatcaaactccgaggtgccggccttcgtatcgtataccagctcatctggcgtgacgatgacatgctggttgtcgtaatcggcgcacgggcagatgacgaagtctatgagattgcacaaaaacgcatccttaaacatgatttgtaaaaggaaacggttggtacttacactttctcagcatagctcaacacttgacatgaaaactttttttgtaacagctctttttattcagaaaaaacgcactacctcaaatggcagtgcgttttataagttttttaaccatatagcctcatgttaataagcaagcaaaattctcgttgaacacttgggtatcactttttacccaatcagctacctattctatacccaaaacagcatgatattctatgatagctgcaaatctcctattgagcctgataaacaaagggaatacggtgcttttcgctgtctcagaagttccagattagtttcccatctgctttgctacttcctcagcaaaattctcttctctcttctcaattccttcaccagtctcaaaacgaacaaatcctttgattgtgatgttggcattgtttgcctttgctacctcttttacgtatgcgccaacgttttgttttccgtcttctgcttttacgtaaacctgatctaaaagacagatttcttttaattctttattaatacgtcccataaccattccgctgatgatcttgtcattggcatctggtttttcgttcttggcctgtacagttaagatttctttttcgtgctcgatgtaagccgcatccacttcatctctgttggtgtacagaggcttaatagccgcaacctgcatagcaacgtttttagccatctctctcactgcgtcatttataacgtctgtttccacgtctactaaaacgccgattttaccgcccatatgagtataagatgcaataaaaccattctcctcagacatctgctggaatcttctgatattcatattctctccgattactgcaatctgtcctgccaaagcttcggatactgtctttgaagtatcaaatttccatggctctgccaggaaagcttcgatgtctgctgcgcttgtctctgctgcctgctctgcaacctgagcaacatactcctggaacttctcgtttttcgccacaaagtctgtctctgcatttacttctacaaccacagcctttttgtcgtcatttattaataaagttctgcacagtccttctgcagctattcttccagcctttttctgtgctgttgcaagtcctttttctcttaagaactccattgctttatccatatcgccttctgttgctgtaagagctttcttacagtccatcataccagcgccgctgatttctcttaattctttaaccattgctgctgtaatagccattgtgttttcctcctgaaaataatatggtaattaagcttcttcgctttctgccgctacaatctcttcgatgtcatcagagccctctgtaacatcctcaaagatttcttcttctgctgttgcgccctgatttgcctcgattacagcgtcagccattttggaaacgattaattttactgcacggattgcatcgtcattgcccgggattacgtaatctaattcttccggatcgcagtttgtatctgcaataccgataagaggaattcctaatgtgtgagcttcctgcacacagattctctcctttttaggatctacgataaagatagcatccggaatcttcttcatttctttaataccgccaaggttcttctgaagctttgctaattcttttctaagagcaataacttctttcttaggaagaacgtcaaaggttccgtcggcttccattgcttcgatttcttttaatcttgcgattctgctctgaattgttttgaagtttgtaagcataccgcctaaccatctctcgttgacatagaacattccgcagcgctctgcctctgtcttgatagcatcctgagcctgctttttagttcccacgaaaagaattgtgccgccttctgcagcaatatcagcgattgctttgtaagcatcatctaccattccaacggatttctgcaggtcgataatgtagattccgtttctctctgtgtagatatactctgccattttagggttccatcttcttgtctgatgtccgaaatgaacaccggcttctaacagctgtttcattgaaataacgctcatgtttttactctccttttggttgttttcttccgcattcttcatctcccgcaggaacgtcattcttcctatattcatatagaagaattcagcaccctcctttggaatccggctgcgtgtttatttttgacctttagcattatagcatgactctaattggaaatgcaaggtattttttgccttatttcctcattttgttccataatatgaaatttatcggaaatcctattgacatcatattagtcagtgctataatcggaattaagatatcacattacgaaacttagtttcatattatggaacttcaaaacaaacatataaaaaaggagaaatgaaccatgcatgaagtattagagcagatccagaagcttggcatcgtacctgttgttgtgttaaacgatgcgaaagatgcagaaccccttgcaaaagccctgtgcgacggaggcctcccctgtgcagaggtgaccttccgtactgctgcggcggaggaatccatccgtatcatggcagagaaatttcctcacatgttaatcggtgcgggaaccgtactcactacagatcaggttgaccgcgcagtagccgcgggcgccaaattcatcgtaagcccgggtctgaacccgcgaatcgtaaaatactgcgtagaaaaaggaatcctcatcacacctggatgctgtaatccaagcgatatagagcaggcactggaaaacgggctggaggtagtgaagttcttcccagcggaacctgctggcggattaaaaatgatcaaagctatcgccgctccttacgtgggacttaagtttatgccaaccggcggtatcaatgcagctaacgtgaaagattacctggcttacgaccgtatcgttgcctgcggagggagctggatggtacaaggcagtctggtagatgaagggaactttgcggagattacccgacttaccaaagaagcagttgccattgtaaaagaagcaagaagctaaaagattctaaactcaatttgtaacataataaatgaaaactctttaattaagaaaggacgaagactcattatggcaaaaaaagtaattacctttggtgaaattatgttaagactggctccggaaggatactaccgttttgtacaggcagatacctttggggcaacctacggcggaggagaggccaacgttgccgtatcacttgccaattatggatttgatgctaagtttgtcaccaagcttccaaagcacgaaatcggccaggctgcagttaactcactgcgcaaatacggcgttgatacctcttttatcgcccggggcggagacagagtaggtatctatttcctggaaaaaggagcttcccaaagaccctccaaagtaatctatgacagagcaggttcttccattgcaacagcaaacacagcagattttgactggaacgccatcttcgacggtgcagactggttccattttactggtatcacacctgcgttaaacgatgatgtggctgctatctgcctggaagcctgcaaagctgccaaggaagccggtgttacgatttcctgtgacctgaattacagaaataaattatggtccaaagaaaaagccggacaggttatgggtgaactgtgcaagtatgtagatgtttgtattgccaacgaagaagacgcctctgatgtctttggcattaaggctgccaatactgatgttaccgcaggtactgtaaatcatgaaggttataaggatgtagccaagcagctggctgaccgttttggtttctccaaggttgcgatcacactccgggagtccttgtccgccaatgacaataactggtccggtatgttatatgatggtacggattactttttcagcaaaaaatataagatgcacatcgttgaccgcgtgggcggcggcgacagcttcggcggcggattaatctgctcctgcttaaacggatgtgattctcagacagccatagaattcgcggttgctgcttcctgcctgaagcattcaattgaaggcgactttaacatggtatccatggatgaagtgaataaactggcaggcggagacgcttccggccgtgtccagagatagtttttgaattaacctaataacttttactgtttacatttccctattgccattgggatgtaattcctggggatgctgttgccatgcagcatcccacttttatagaggagttttttaacatgaaaaacaaaaaagattttgatattctggcacttggagaattgctgctgcgtttatccccgcccaacaacgagcgccttaccaggggagaaacctttcagaagcaagtggggggagccgaactaaacgttgtctccggcgcctcacttctgggtttgcgtaccggtattatttcaaagctgccctctaacgatatgggtacctttattaaaaaccgcgtgcgattctgcggagtcagcgacgattatctggtatacgataccagtaaggacgcacgcctcggggtatattactatgaaaacggagcccatccaaggaagcccagcatcgtatatgaccgtatgtatacctccatgaacaaaatagatgtctctgacttttccgaagatctctacgcttccgcccgctgtttccataccagcggaatcaccctggccctcagccctcaggcccgccgcacaggcatcgaaatgatcaagcggtttaaggaacagggaactattatttcatttgatgttaacttccggggaaatctctggtcaggggaagaagccaaagcctgcatcgaagagattctgccctatgtggatatttttttctgctccgaagacaccgcccgccttacttttctgaaggaagggaatctaaaggacatcatgaaaagctttacccaggagtatcctatctccatcgttgcttccacccagagaattgtacacagtcccaaagtccataccttcggttccgttatatatgatgccaaatcagacgcatattttgaggaagagccttacagggatatcgatgttgttgaccgcatcggcagcggagatgcctttatctccggcgccctgtacggacttttggcccacgactttgactgccaaagggcaatggaatacggcgatgccacaagcgcagtgaaaaataccattcccggggatctgccctcctctgatcttacagagattaaccggatcatctctgcccacaaacagacaggaagacagtctgagatggatagataatcatttatctcctgatcattttcccggcagccgccagcagagcaccgctccccaccattatccactgtatcggcacccgatccgccataggaccgaagatgagcattcccaggggcataacacttcctgaaattatttgaaatacagaaaacactcttcctaatttgcctgcctcaacctcttcctggagcatgactgtagaagctgtggccagggcaggcataaaggcccctgagatcatcattacagccagatacatccagaaatacggagtcagcccaagcaaaagaaatgtgattccaaaccctatataggaaactgccatgactctccacttgtctttaaaattacccttccaggccacaaaaatccctcccagaagggatccaacggtccatacgatttcattggccgacagcctccacacctcactcccaaaagtcctctcaatcataagaggcgttaaaaaggcagcgggagttataagaaagaaggcaattccgtaaaaaatcagtatcctggatacaatggcatggcctgtggtatattgaattccttctttcaattccttccacatggaaacctggcctttgcttacgggcttttccaccttcaaaaacgccataacgcatatggcaagggctgcagttatcacatctaccagcatcgcccaggcaatccccacacttcccagaaggacgcctcccacagcaggagaaatcatcataaggaccgaattacacgtctggttaattccatttattctggtaagcttttcctgaggaataatctgagggacaatggctcctacggcaggcgtctgcactcccgctcccactgaacggacggctgataccagcataagcatccacatcgaatcttttccaactaaaaacatcagagcaagtcccagcgttgaggcagcaataaagccatccgacaccataatcagcatttttctgtgataccggtcagcccagaccccggcaaagagagagatgaaaagctggggaagcagagagcacaggattgaagcagtcatccacatacccgatgaggttttcagtgtaatataccaggtaatggcatatccaaccacagaagacccaaaaaggctgatattctgactgacaagaaacaagatacattttttcttccattctttcatatttacctcacattttagttatcaggcaccggaatgcctttttctttttgagtaaaaaaaacaacagacaaacgttcccttggaacctttgcctgctgcttacatccgcaaaaagagcataatttcagaatatacactctgtaaaaaacagaggcagcctgctcatgcttcaattccgcaaaataagtatcagaaaaaagctcccatcggaacttagcttctcccaaatcacttatcttaaacgagttgaaaacatgaacactacctcctgaattctattgttgttataacatatcacagctctccatctctgtcaacagttctttgaaatcctggggaaaatccgctgacagcatgattttttccccggtaaaggggtgaatcagtttcactttccaggcgtgaagtgcagttctttttatgtgctccatgggacctccgtacagagagtctcccagcaaaggatgccccaaccctgccatatggacacggatctgatgtgtgcgtcccgtttccagacacagggccaccgccgagcaggaatcctcctttcccctccccataacccgataatgagtcaccgcagtctttccactctgggataatttcatcttcataagagagttctcctctctttctattctgtggtatattgaacccttccttatatcaggcactccccggacaacagctatatattctttttgaaacctgccattttctttttgctgaaaaagacgcgcagcagcagcctggctctttgcaaaaactacaataccggaagtctccctgtcaagccgccccacagagcgtatacgtaccttctcacctctgtttataaaatacgctgccagcatattagacaatgtcctgctgtaatggccgggggagggatggacggtcagaccggatggtttgtctgcaattagaagatcctcatcctcatagagcacatgcggcgtttccatacatggaatcaaatggcttgatccggtattctcatcctctaaaagaaccgctacctcgtcgccttttttcaatatagtattgcttctgcttcttattccgtttacacagataccctgctccctgaactttgcctgacgaatctgccgcttggtcagtcccatcgtacggttcataaaagtacccagaagcatggtatcttctttatctgtgacggtgcgccttactgtttttttcatctttccggccttctgcctctcttttttttatctgatatgatttattttaggggcattgaaatgtaaagtcaacaacttagattttatgatttacaaagggagtcggctatgctaggatgatcatatccaggtacgccaggccggcagtcctgagacagactatactatataatgtatgccgttttttggcagaggaggtactatgttaattttaaagaactgtaatttcatcgcagatttagtggaggggttcggggagacagccggagatatccttgtagagcaggacaggattaaaaccattgccccctgcggaacacttcaggctaatgaaggagaccaggttttggatatgcaggggcagtatgttcttcccggactttttgaccttcacattcatcttaccctgtcaggcggtgagactctggtggacaatgccaaatctcccatccagcaggctcttgatgctgtaaaatatgccgcagatactttaatggccggctttaccacggtcagagatgtgggttcttcctataatgttgccgtagagctgagagatgctattcaggctggaaattttcctggccccaatattattgcctgcggcagaatcgtcaccgctaccgagtgcggaaatgactatttccagggcatgtatgcggaggctgacggaaaaactgagatttggaaggctgtacgggaagagatgaagcgcggcgctgactttattaagatcatgggcaccggagctgttatgaatcccggcggagagcctggacagcctatctacaccttagacgagctgaaggctgtggtagaggcggcagcatttaaagatacatacgtagcaacacactgccacggcacacaggcaattaaaaattcaattctggcaggagtgcgtaccattgagcatgctactatcctggacgacgaagccattgagatgctgaaagacagcactacatcttatatagtgcccaccctcaccagtctgtacgctttggctgacagcgttcctgatacttctatttttatgaaggcaaaggcacagaagattctgggatgtctgaaagaaggactccgcaaggcatatgaagcaggccttgtgattggtttcggcacagaccagggtggtgttcctctggtacacggggaaaatgcggatgaatttgcactgcgaagagatttctggggaatgaaagaactggatatcattaagcaggcaaccatcaacagcgccaaaattgtgcgcgtggagcaggactacggaactttaaaatccggaaaaatcgctgacatcattgccgtatccaagaaccccctgaaagacatctcagccttccgaaataatctgacaactgtagtaaaatccggctgtgttgtaaaatcatgattcctgctgcagcaatccgagaggaggcccaaacttatgtctttggtagatcagaaattaaaagatgccgttatacatttaagcgatgaaatattcgaattttcctcctggctgaccagacatcctgagatctcaggggaggaagaaaaaagctgtgcctttatcgttgattttctgcaggaacatggctatgaaatagagtctccctgcggaatcccccattcttttaaggcgaagcgaaaaggtattccccgggatttctatccaaaagctgccgtaatgtgtgagtatgacgcactgccgggtatggggcatggatgcggccactctgtaagctgtgggatcagcatcctggctgcacttgccctgcaggaggcatacccggaactgcccatgcagatagatcttgttggaactcctgcagaggaaaccattggcggcaagattattatggtaaaacagcacgtatttgacgaatacgatctggcgattatgtcgcatctggccaatgacaattccgcacaatggcctttgttggcttccaatgacatgctaattactttttatggaaaaccggctcacgcctccagcaatccctgggacgggatcaatgcctacaacgcggcacaattattttcccacggagcagatatgctccgccagcatcttacccctgactgtcagtttcatggaatcattacggaatgcggcagtgttcccaacatagttcccgataaagcaattctggattattacctccgttcagcaacgctgtcaggcctcatagacctgagagagaagcttgagaattgtgtgaagggtgctgctgttgccaccggatgcacttacaccatagaacagcggtgggatacttattgcgagctcttccctgccagggaggcttccgcagatatccacaaaatatatgaagagcttcatatgccttactggccctcccagccgcccagcgggagttcagatctgggaaatgtagacactgtggttccaaccataggtatgcgctgctgctgttccgatgaatttacccctttccataccccagaactggaaaaactgctctacggcgacaggggaaaaaagacacttatcgacggaaccattgtcatggctgcctacctggcactcctggcatatcagccggagcgcctggcggcgctgcagaaggagcattccgcatacagagcacagaacaggagggaggactgaatcatgaaactctcggaaaaacttaatgcatccattgaccggttatttaatccctgctggaaactgggagattatattactaaccatcccgaaacaggcggctgtgagaaagaggctgtgagcaaaatcacagagtttctggccaaacagggctatgagatcacagctccctacggagacatgccctatagcttcctggcctctgaccaaaggccctcctcgatttctaagccgaaggccgcccttttgtgcgagtatgacgccctaccggaggtgggacacggctgcggtcattccatcagcggagcaatcagcatcttatccgccctggccctgcgggacgcctatccggattttcccttccgcctggacattataggaaccccaaacgaagaggcgtacggaggcaaagttgcaatggccaaaaaccacgctttcgacggatatgagtttgcgattatgggacacttggacaaccgcaattatccccagatcaaaattgtagcctgtgacggcatctatgttattttcaaaggaaacgccacccacgctgcctccagccctgagctgggtgtcaatgcactgaatgcggctcagtttttcatgcatgcctcagatatgctccgccagcatattccccctgactgtcagatccacggaatcgtggtaaaaggcggagaggttcccaatacagtgcctgacagagtggaactggatttttattaccgtgctgctactatggaacatatgaatatgctgaaagaaaagctgatgaactgtatccggggagcctgcatcgccaccggctgtacctatgaattgaaagaaggctatactgaactctatgcggatctcagctaccttcccacagccatacgtaccatcggagagatttttgacgctctgcatatgccctgggaagaaatgaaaaaggcagagggctctacagatgcaggaaacgtagatctcatcatcccaaccttccatctggaacttcagtgcaccgacaagttcgctgacttccacaccagagaattcgaacaggcaatgcatggagaacggggcaaaaaaaccctccgagacggcgcccgggtaatcgctcagtacatcaaccatctggcagaaaacccggatgtactcaggcaaatccaaaaagaacacagggaataccgggaagttaaaatatagtttatgaattagatatgcactcaaaacagccgtcacgaatcagatttccagatatcaaaaaactgattgaggagtgtgagaaagatgaaagataaaaggcgtttaccatgtggcttatagcagcggttttatccgcattcttcgctggagtgacatccattcttgcaaaatgtgggatcaagaagacggattcagatatagcgactgctctcaggacagttgttgtacttttgttctcatggattatggtttttatcgtcggctcagcacataccatatcccaaatacagcctaagactttgctgttcctcattctttctggtacagcaaccggcgcatcatggatgtgctacttcagagcactttccatcggggatgtcaacaaggttgtccccatcgacaagtcaagcaccgtattgaccgtcttgcttgccattgtccttttcaaagagacagaacatctcgcagttaaactcgccggaaccgtattgcttggagttggcgtccttctcatggttgagaaaaagaaatcacagaacgaggtttcgggaaacgcatacatactctatgctgtgggatcggccttcttcgctgcgctgacatccatccttgctaaagtgggaatctcaggaatcgaatccaacctgggaacagcgatacgcaccgttattgttttaataatgtcttggacgattgctgctctaaaaggtaaagtaggcaagttaaaggaattggacgggaaagaacttatttttattgtactttcaggaattgccaccggggcctcttggttatgttactactatgcaatccagaatggcgtcgtcagcgttgttgtgccgattgacaaaatgagtctgctcattacggttgtcttctcttatcttatcttcaaagagaaactatcgaaaaaagctctctttggcttgcttcttatggtactcggaactctcgcaatggcaatatttgcataaacaggcatgcacaattacgaatcagaagctatctttcttttcaactgcgcctcaccaggaacagaaagcccgaaggctatctgccgtctacgttttcgcgtggtcagaagggcacgggatttctcccactgtccctctgccactaaacgcctgccgacttgataaatctcgagttaacgccgctaaatccaaattctacaccagttccaccccatacgtctccatccagtaattcacctgcagcatatacgccagcatctgcggccctgccatcagctggccgtaccagggttttccgtaatcggaaggactctcaatgaatttcttaactttcccggtatccaatatctttctcaccggagctcccggatctgccaaaacttcctgtaatctttggcccagcaaagcctcgtactccggatgataggtctttggataggggctttttcttctccagagcacttcatccggcaattttcctgccccggcttcccgcaggagacctttcacaataccgtccggacacttcatctgccatgggacgttccatatatattccacaatcctgtggtctgcaagaggaactcttgcctcaagtccattgtacatactggttctgtccatgcgatccagcagagtaaccatgaaccaccgcagattgagataggcaatctcccggcgccttctctccacagcgtcttctccctccaggcagggagtttcatctatagtcatttcataggcctgtttcgcatattcttccaaatgaagttcctgaatgacatcgtcagacaacaggactttcctgggttccatacttgaggaccagggaaaggcttctgtccggaaggcttcctgtttatgaaaccagggatagccgccgaagatttcatccgcacattcgcctgtcagtgtcactttattatagtcaaccactttagaacaaaagtacagcagtgaggattccacatccgccatacagggtaagtctctggcatccacagcctggaacagataatctatgagttccatattgtcacactccagataatggtggtttgtctgggagtaattcaccattttatccacccagggccggtcttcactgggctgaaaatcattggctttaaagtattttcggttatctttaaagtcaaaagagaatgtgttcagtatcttgccttgctttttcagttctttggcacagatagcagtcaccaggctgctgtccactcccccggacaggaaagtgcttatgggaatatcggaaagcatctgcttttttacagcatcttctaccagccaggctgtcttttccaccgtcttttcataggaatcctcatgaggcctgctctccagcttccagtaggcttgctcctccagagaatccttggagaagcgtatcctgtgtccgggcagcacttccttgatatttcggaaaactccctttccgtatgtctttgccggtcccagtgccaggatttcgcaaagtccctctttgtccacctgtggttttacccctggatactccaggagccccttgatctccgaggaaaagatcagcgtattgtccaggaaagtataaaaaagaggtttgattcccagacgatctctgaacagataaagagtatcttctccctcatcccatatggcgacggcaaatataccattcattttttttatatacgtctctccatggagaatgtatcctgttaggataacttctgtgtcactctccgtttcaaataccgcaccttctgactgaagctcccgcctcagctccttcatattgtagatttcaccgttgtatactatcgtccaggttcttccccctgttttcttcttcattggctgatgccctgtcaaaagatcgatgatagccaaacggacatgggccaggccgcagtggggggaaaggaaaattccctcatcatccggccctcttctcttctgcactttgttcatcctggcaagcagacgctcccatttatttctctccttagtgaattctccccttagattacaaaatccggcgattccgcacataattccacctcaatctatattattgtataataggctgcagctgtctgccttctaaagcagcttccagtgtgggaactaatagtcccgtatgggcaatcatcgagtttggcttcttcaccggatcgtcctgtccaaagggcacaaagtatatgtgtttggcattcagcagaaggcctatatttttcatgttcatacccaatgcatcattggtggatacagagatgaccaaaggcttttcattcctgagatgcgccttcgcagccatgagaacaggggtatctgtgataccgtttgccagcttagcgattgtatttcctgtgcagggaaataagacaaggatatccagcaggcttttcggcccgatgggttccgcctgggaaatggacagcataggagggattccggtaatctcttccgctttttttacaaaatcctgtgcatctccaaacctgctgtcaatggtctgcgaggcattggaaaaaatcgtctggactttcgccccttccttcaccagctgctgcagttctgcaaaggcttttttataagtgcaaaaagacccggtaaaggcaataccgatatttttattttctaatttcatattacagctccttctttggaaagtgttaattggataagagtttcagcaatcatttttccggatgaacccggcgcatatttcccgggaaggccaaggcagagacaggctttccggttcagttctttggccgcttcatagtccacacccccaggggcagatgcaagatcaatgataactccgcgatccggcattttttccaacagactgcggtctatcattctgcagggtacggtattaaaaataaaagaatactgtcccatatatttatttaattcttccggagaaatcgtatcatcggaaatgatagacgccattgccctggcttcaggacgtctggcacagacagtaacattacagaacatgccttttaaataagcgcagagtgttcttgcacaccttccgtatcccagaaccaggcagctgctgtgtcccaggttttcagggctgtttgagattgcctctgcgatcgccccctctgctgtggctatggtgttataaagggtcagcgcttcatccttcatgaaatcatacacatcagcgcccttttgctttacttcatcactaatcctttgggggatacatccggcatagaggcactgcccctttttcattgcccggcaaagttctccgagtgcagcaggcagattttcgctggtactgaaaatatccttctgattctttgtaagagggatagggcccacaatcgcccaggaaccctcggctaagctgtccagagattctgccttactcacgcagtctgcactttccggcattccgtaagcgcagatcctgtatcctttatccgccaatattctggcgcagtatacctgacgcatatcgccgccgacgaatccaaaatcatatctttcaggtgtcatattctttctcccggcagttttagttcttaatactatatgtccggcatattatttatgtgcaaaaagaggcgccgtttttaaccggcacctctcatacagaagtatgtagttatacttgattcttttttccttttccgaaatagctctctgtaagtttcaccactacagccgcaaatatccacagggatatcaggtttgggagcgccatcaggccattgaccgtatccgcaagattccagactacactgacattaataacggcccctagaaaggcaaacacacaccaaacaaaacggaaaggctttactaccttatccccaaacaggaatgtcatgccggtttccgcgtaccaggaccatccaagcagtgtggaaaaggcgaataaaatagtggcaacgataacgatgatgcttccccactctcccggaagacccacagagaatgcatgtgcacttagggctgcgctggtttctcctgaattccatacaccagtagtcagaataacgagagctgtcatagtgcacacaacaatcgtatcaaagaatacttccacaatgccgaagaccgcctgctcacaggggtgatttactgaggctgtggcatggatcattgctgaagagccgatacctgcctcattggacataatcccccttgtaactccctgccggatggcaaacccaatggtggcacctgcaaaaccgcctgttgccgcctttccctgaaacgcacttgtcacaataagtccaagggaaggaaggatctgatctgcgtgcagaattaatatcacaagaccggccaggatatagatgcaccccatgactggagtaaggatagaggttacacggccaagacgcttcacgcccccgataacaaccgcccctgtcaatactgcaaagatcgcgcctatcagccatgcaggcacgctgtatgccgctaaggaagacactaccgtattcgtctgaagcatattacagctgattaaccccacaaaggtagctgcaaatgcaaaaaatccacccaggaattttgcaagcgccttatgattgggcaggccgttcttcagaacatacatagcgcctccatgccatacgccattgtcatctttttccctgtatttcatagccagtgcaatttctgaatatttggtggccatgccaaagatagcagccacccacatccagaagatggctcccggacctcctattgccagagcagcggctaccgctgcaatattgcctacgccgatacaggaggacaaggctgtagccagggcccagaaggagcgtatctcaccatcccctgttttctttttaccaaacatagatttgaatgccaatccaaattttcggaattgaattccttttgtccgaaaggtaaggtatatccctgttccgaaataaattaccagcatgtaagggccaaacaaaaagcctgtcattgtcgttaacactttatttacagcatccatattcctgcctccttatcagttctgccagaccagcagttcttttactttttttgccagagcttccgccagattcctgtgcccctccgcgtccagatgaacagcatccactggacttgcctggcaaacctcctgggcatccagatactcacatccgtactcccggcacaattcttcataatatggtgcgatctgccgggaacgccattcacagcccctgcccatattctccccaagatctgtttccggcaaattgccgcgtatgtgaggcggggctaccaggagtatcttcggcacctgctcctctctgccggaacgggagatcaatacagcgtccagcatgcgccgcatacttctggctatgttatagccgttcagctgaaagcgttcctgtgtatcattggttcccagcataataataagcaaatccaaaggtctgtgtgtctgaaggcagggaataagatattccagcccgctccgatatccggtgacaggatcctcccacaccacggttctggagtttaatccttcctcaatcacatagaattcctccccaagaaactcctgaagccggcccggccagcggattttcctatcgtacctcagcttgccgctgcctggtatatagccccacgtattggagtctccatagcataaaattgttttttccacattttcacctgctttctttatctagttccggctaaaaatgggccgacttgaatgttttaaagattcatcctcctttatttaaattttataatgtttataattttttgctattttttattcattttttatattttaacacttatttagtttattgtcaaaaccaatttgcatcaggagatctgcgtctggaatataatactgcactcagcagagcccctatgggaacggtcatgataattgctatggtcccggaaatcccctgtgcaatctccattgcgataaaatcagaattcataagctgcgcgtactctactccatatgccttcagcataagaagtgtcgtcaatgagcttcctgtaaaagcaagaatcagggtattgcacatggttccaatcatgtctttccccacacgcagccctgactgaaataattcccggggagtgatatctgctttgtggcaggtaatctcatagagagaggaggcgatggataatcccacatccattacggcaccaagactagaaatcagtattccggcaaataaaacctgtgatatctgcagtcccgtgttctgagagatcagaatcagcgcttccgcctgatctgtgttaaatccgcttacatgtaccagggatgctataacctgaaatataatccctgacaaaatgacgcccattcctgtagctatggttgccacccaagtctttttatgattgccgttcaatagaaacagagataccgcagcagttattacaacagtaacaatgcaaacccagatgggggaatagccattaaaaatcatcggcagcataaatcccagtatggtatacatagtaaataaaagacttactgcagaacgtaatccttttcctcccccgatcaggaccataatgcctatcataattcccccgaacataaaaataaccggtgcccggtaatagctgtacaccgtgatcaaagtttccgcttccaggggattatcaatgcaggcaataaaagtctggccgctgtgcagcctcacattatgagtggttgatagataattatcaataagaacctcttttccctgaaaatctccctgaagtattctcgcccgcagagtctggactccatagtatctgcccttggtcgtttcgtcttcccgcgcgttctcttccactacttctattacctcagcttttgcataacccaggctttcactgtttatcagagaaagagtaacaggatttttgtcattataaagataaaccccaaaactaaatactataatcagcaacaggaaaatgatatctgtcttctgccttttcttcatttatttaactcctttttgacaaagtttccaataaagcgtcaggcggcagatgactgtcacctgccgcctattctatagttcttgagtgttcaaaaccaacagaagcctttttggtatattacggatttacacatgctccgctctggtcaaaacggtacattttcccattaatttttaatgactggccgctgaccattgccccatttcccttcagatagtaccaggtagttccaagttttatccatccggtagccatggccccgctttctttcaggtaataccaggttcctcccatctgtacccagccgacagccatcgctccgcttcctctcaggtagtaccaggtttcccctacctgaacccagccggtagccattgccccgcttcctctcaggtagtaccaggttcccccggtctgcagccagccggtagccatagctccgctgtctttcagataataccaggtcttaccagtctgtatccagccagtggccatggctccgctttctctcagataataccaggttccccccacctgtacccagccggtggccatggctccgctttctctcagataataccaggtcccgtcaatttctatccagccggcggccatggctccgctctcttttagataataccaggttcctcccactttgacccagccggtagccattgccccgcttttgctgagataataccaggcgccgttggtatccagaaaccatccggtgcgcatataccccttttcgtcaaacgcataccaaataccgttaatctccgcccagctattcgtctgataggttccgtcagagagctttaatctccagccccttccatcattttcccaggtcttggtgattggtttttcatttgtggttttatgaatggtaaattcatctacaacagatttgtctgaggttctgtatgtggtaattcggaaagtgtcctcagatacatcaatcttagagatattgggcacatgctcctgatttttgaccgccacataatctccctccagattcgaagagaattcataatacttactgccgctggcagagttggcagtaatataaacaataccggacggatctgtaatttcactgattggctctccgttttcatctgtggattcttccaccataggttccaggccatccatcatgtagcttctggtatatacatggtcatgtcccatgagcactgcatcgataccaagctctttaaataccggtgccagtgtgcttctcctggaaagaatatcgttatctaccgcatgactggctgtactgtatatagaatgatggaatataacgaatttccagtctgtgtccggatttaaatgaatcgcattcctcatgaattctttatgctctgccgtactttgattgttagagttgattaccaggaacaaggaattgttatatacataatagtaatcaccgttggcattgccttccccgcagtctcccagctggcttacattaggcagattaaagtgtgtattatatgcagtgcctttgtagtcatgattccccacagcagtggcaaagggtacgctgtacacaggacttccgtcataattagccagataagcgtcatactgaagttcactggttcctgcctccacatggtcgcctgcattctggataaaactaacctcagaaaataaaggatcctgctgaataagattcagggtgtttctccatccgtccttatctgcgtccagatctccggatgaaccaagctgagggtctcctgcaaagataaagctgaaatcaccggatgattttgttttcgtggcatacacttgttctgaccagattccattgtttcccactcgatagacatactcagtgtcctcctcaaggccggacacagttgcctgattgctggtgtacacctttccctgggtaagtgtctccacggcctcaaaggtctctgccttttcttccggaaaagcatccccggtcatatcagattttttagcgaactgtacttgtcccccctctgttgccagagaataccaggtaagatttaattccgaaggtgtagccccaatggtcagggaaaccgcttttacagcatctctgtccggcagagttgctgtgtccgggtgcaaatccagatgcccgaacttaaagtacccctggctgtcagcttctgtcttatgcagctccactgcaattacattctggccctttaccagcatctcactgatatcccgcatagtcacatccgcctggcggatattctctgtatccccgtctttgctgccgtatcccagattatctttgtgggaaccatttccagtatcttccgtcttatatcccgcatccggaacatttaaagatgtcagctgctgcccgtttacgtaaatgatagccgcatctttatagtcaaaagtaagatgaaggccctctatggcactgggatcctccacttcaaaatatcctctgaaaaaatatgcctgtgattctgaatttaaggttccgtccagtgtatcgaatgaacctgcatgagtctcccaatccgtgtcattgtaaacactggaatcctgggcatttgtgccgaatttccttgtccagccgttatactgcccccatttgtcctttgcaactgttccgtctgcgggatccccattctgaaaatacttccactcatactctgcgtccatggcataccccgccccgctgtacggggagatattttcttctgcactttttgcgccttcctctgtatctgccagtacgctgcctgcggtgccaaataccattgccgctgccagtactcccgacagccatcttgccgcatttctttttttcataaatttcctcctcatttgattctattgatttgaacatcgcttactatatcactcccccgtaaaattcaggttattctaatcaaatatctgtgtaaaaaataatattttacaaatttattatttttttataaatagtttcccaatgcggttgaccaatccattgcaaacttttacaatgagcataggctgaaagcagaaagggggaactccatgaaacgttcactaagccttatactcgcagctgcccttgtcttttccatggcaggatgcggggacaaaaaagagacagaagagaaaaccacccaggaaaccactacagaagcagacacttctacctcaactgtcagtggaacccttgaaacctttacaggcagctcccttaccatgacaactaccgacgacaaagaactggtatttgatgtaacaggcgctacattggaatgtaaagatggcatggcagccggcgatgcagtcatcctcacctatcagggagaaatctcagggacggataccagcaaagctaaagtagtaaaaataaccaatgaaggggttgagaccttaaccgctgaggtagagacagtacataccatttccggtaccattgtaactgcatcctccagtcagctgtccgttaaaaccgattccggcaagatgaccttttccattcaaactgctgcgatagacagttctttggacttggaaaagggagatgaagtatctattgattatataggaagtatcaatgatacagacacaagcggagctcaggtagttaaggtaagcaaagattcgtcctccaaaaagaagtctgaagaaaaggaaaagacacagactgctgaaaaagaggaggaagaagaaaagccaaaggaggaaactcagactcagcaggaaatgtccattgccgatgtgaatgaaactgtctatgcagcttcagatgtatatgtacgaagctcttacgataagaattccagcattgtagggacactccgcggaggcgaatctgtggtacgcacaggcaactgtgccaacggatggtccagggttatattcaatggtcaggagggctatgtatatcaaagctatctgacaacccagtctccggagcaggaagtgcctgctgaacaggaggaagatacttcagacagtaatcccgaaggggagcaggattctgctgagggaaacgaataattaatacaaagaaagcacaggcaataaggatgtctctttccttatcctgtgcttttcttttatcccattatgtaaagctccttaatcacaggcagctttaaattccgtccagtttttgttatatgcttcgtcagcctccgcactcacattttgaacaatttcaccttttgtgacatcagaaggtaccaccagatttgggtttaccaggggatccgcttccttattggtgctgtaatatccaatataattaaaacactctgccgctttttcaggctctaaaatataattcaggaactgatgagctgccgccgcattgggggcatccttaggaataaatgcagacattattccgaatcccagcccttcctgagggtatactacctttaaatcaggattctcactgagcgcctgagttacctgggaggtgtataaaaatgctaccgctgcctcgccgttcagcagtgcgttctgtgtattgtcgtcctgtatcatacgcacattgggcgccagctccaacagcttctcacctgcttccccgatcactgcggtatcctcctcattcattgacttacccatcgttaacagtgtgataccgtttatgacacggtaattcgctgtcaatgccaccttatccttcaaggcttcattccagagatctgcatatccttttatctcaaagtccacctgttccggatcatagacaatcaaaggaatcccggctccgtaaggcacagtatactcatccttgggatcgtagaactggccctggtaaaggggattaatatttttataattaggtatctctgctttatctaatttctgaaccagatcctggcccactgcctgttcaatgatgtagtcatccgcgatgactacatcataatctccgccctttgcctgggacagcttttccagcatggtctcatccgtatcaaaattagaataaactacctttacgcctgtctcttcctcaaatccgtcaagtacctcctggggaaacataccttcccaggtaaaaagtaccagttcctttgagtcatcttccttttgctcaccgcatccgctgataagagccgcagccagcactacactgagcatgcccagaagttttgttcttctcttcataataactctcctttacattaagattgaacatgattagtttcctttatctgttcttcttccccggttccccagggctgaagtgataaataatatgaaaataacagtaatcagaatcacggtacacagcgcgttaatttccggtgtcacgccagttttcagctgtgtgtatattttaatgggcagcgtgttcagtttaggtccatttacaaaaatactgattactacgtcatcaaatgacatagcaaatgccagcaggcacccggacatcacggcaggcataatcaaaggcagtgttatgtcaaaaaaggtcctgacctgggttgcacccagatcccgggctgcttctgcaatggatttatcaatgccaaccagccgcgccttcaccatcataaaaatgtaggggatacaaaatgtagtatgcgcaattaccagggttgtcataccaaagggcagattcaaaagtgaaaaaaatgccagaaaaaccattcctaaaataatttccggaatcataatgggaagtgtggaaatgtactctacaatccctttgcttttataatttactctggccatgccaatggccccaatggtaccgataacggccgaaaccccgcagctgagtatccccaggacaatactgttccaaagagcttccctcagcccctcattatgccaaagggtctgataccatttcagggaaaaccctgtccacgccgccgtaagttttgactcattaaaggaaaataccacaacaaataccagaggcagatacatgattatcatgatgactgccagataaatattgggaagttttgttctgtttttcaaaatatcccctccaaatccttcacatgagtgatgcttctgtagagatacatcatcagagatgtcattaccatcagcagaacagccagtgcggcagcgaagggccagttactccctcttgtcagctgatcctgaatcaggcttcccaccagtactattttattgcctcccagaatatcggcgatgaaaaataatcccatagaaggcacaaaggtgagaattacaccggacaacagtcccggcagagtcagctttagtgtcaccgtcataaaggcgtatatgggtgaggcgcccagatctctggctgcctctaccagcgaccagtccatcttttccacactggaatacaccgcaagcatcataaacggcacaagcgcatagaccataccaataagtactgcgggatatgagtataaaatctttaacggctcgtctataacacccagagccatcagcaatttgttgaacacaccttttgcctgaagtataataatccatccatacattctaatcagagagctggtccagaaaggcaccataatcagaagcatcatcctttttttccattttgcagacagcttagccataaaatatccaaatggataacctatcagcatgattaacaatgtgctgaaaaaggccagctggaatgactgagcaaagctctgaaggtataccggctcaaatatcttcttataattttccagggtaaacttccatgttactccccagctgtcattattcgtggcaaagctcagtccgatcatgtagagaagcggccccagcacaaaaataagtgtaaacagatacaaaggagcaactgtaagaaaaactttagaatgtttctttttcgtcattctgttcctccctgtctacgataattgcatcagcgggcttccatcccacacataccttctgtccaatctgtacatgagagtcgatgccgtagcggctggctataatctcttttccatcttccagtccaatcaccattcgcagctgacctccggagaaagatttttcaagtattacggctgggagagcctctttgcactcctcacagacaaggatattctcggcccgcacagcaatcgttatctcctgccctatctgttcccggtctggatcaatgattactttgatctttcccgtgctgatttcaacaagagcctcctctccctgaatctgaacaatctttcctctgacaatattggcatttcccacaaaggtagccacataactggacgtagggtgattatagacctcatccggtgtcccgatttgttccaatacccctttattcattaccacaatcctgtccgacatattgatggcttcttcctgatcgtgagtaatatataggaaagtgattcccagctttttctgaagcttcttaagttccagctgcatggccctgcgaagctgcagatcaagggctcctaagggttcatctaaaagcagtacttttgggttatttaccagtgccctggctatcgccactctctgcttctgtccccctgacagttcctggggcattctcttttcgtatccggacagctgaacaagctccagaatcttttttactttttctttaatttctggcttcggcatcctgcgaagcttcagggcatagccaacatttgcctccacgttcatatggggaaacaaagcataattctgaaatacggtattcacatctctctcatgaggttccagccgggtaacatctctgccctccagtatcacctgtcctttatccggcatctccagccccgctataatacgaagtgtagttgtcttgccgcatccggaagatcctaaaaaagtaatgaattctccttgttttatcttcagatcaattccatttaaaacctctgagcttccaaagctcttttcaatccctttcagctctagtatactatcttccatgtatgtatcctctgttctttgttgagtaaaaatacccagtttcttcttcaaactccgattttaccatctttttactaattatgcaaatcttattataacacaaaaagatttaagttgtaaaattttacccaatcccaaagataagttcctctcaaaagtaatgccggacctggcatacgccgggtccggcatagctgtcagtgggcgtgattccctccccctgattcctgcagataagactgcatctgggtgatttcctcctcctgcagggaaatcacattatcggcaaactgtttcacttcatcatcctctgtataagccaggatcaatcttgccatatccactgccatctgatgatgcatagacattccctgggcaaatgcccggtccagatcctctgtctctgtctcgtgatcctcgtggttttccatcatagcattatattctttcaggtatagcttttctttctcttcatcagaggtccctgacttctccagtcttgcagtcatgtcctccatctgtctgatttcttcttcctgagcattgataatagtatttgccagttcgctgaattccgccttttcgcccgcatactttaaatagctctttgacatttcaatagcagatttatgatggggaatcatgcccttcaggaaatcaagagatgcattgcccgtctcttttatctccatatcatccatcatctggtccataatctcatcctgctcctgaatatatgcgtctgtgtctgaatccttggttccgcagccgcctatgagcataagggtacagagtaaaacagaaattacttttatttttcccatgtaaaacctccatagtaatttaataacattagtattccccttttactcccagacattcttttatggaaagattctcccccgtgtgaccgctgtgttacctgattcctgtatatatagtttatcttgggtattgtcaccttatatctgaggaatatatacgcggaggttttaaaatgaagctgtcagaattgatgataatcctggaaggaaaatggattgagaaaggactgaagcccgaccaatatatagataatatggcacccccaaaagaactgtatcacagaattgtacaggaactaaaggataaggggatctatcatgaaaatgattctgaaggtgctgtattatagaacaggtgactggatgtagatgcttttgacggacatcgaatgttgaaaattacatttagtattctaaaaattacatttgacatactgtatgtactgttgtatactaataacggatagttagtaataccactcactatctcccccctcaagtttaagcgccctgcagcgatgcagggcgcttttaattgaaagtaacgttatactcggcatcttaaaacacacaaaagcctaatatacttatataaaaaggcggaattatatatgtcatataatgagaaacaaaaaaactcctgcccactcttccggcactgcaatccttccaatgtcatccaatattcgtattttcctttcgccagtaggctcaccttctttctctatatagaaaaagagccactatagtgtgactctgttcttagccatcatttctacattaaatctaaaaattctttctttttcttttcaaattcttcttctgttattaaattaatatctttcattcttttcagttccatcattttttcagttacactattgccagaattatttttagtgatatttatattttcattttctccgctaattggtttctttgtacaccatacaattaacgctatcactcctactaacagcataactagccctgcagctatacatattttgtaacttagaatatgtccagcccatataccagctgtatcaaaattcccaaattctacagctatattatactgacctttgcctttatctaattgtacaaacccataaattgataccacagttccaatgcctgctgcgaaagcccctataacctttaaatttgtgtctttcatttagtctccctctctatatactattcttctatgatacagtaaaacgccctatatttctacgaagcgcctcaaataatttgtttatgtggaagcataaagactaactaatgcatattctagcctattaataagcatagtaaaggcaccctaaaggatgcttagtaaatactacctcctctctttttatcccatatacaacaaactgcataaataatcgcctgaaataattccagaagaataaaatattgtatgtgcattttaaataacattttaagaattaacccgattgcaaagaaaccacagttaaacgacaaagccatgcttattgcaagattgacattatccttaccgcaaaacgaaaatagtatggttacaatatatagtatacatgctggtgttattgatatagagcacccaaataccagtaattttataatatccattctttcaaataacccaatgtcaaatgcggctatggttaatataccaggtgcaactattcctatgcttatcaatactgctgcacttagatttttcgttatatacttaaagattacttccatatttctccacccccatggtatattctatcaataccacaagataattgcaataaaatacgtactatttcagagatgtaaaagtaccctgtatctctactgatcgctcatgagaggggatagtgaatgtttaaccagactatttacctataagtgtacttctttcatatctttggattatacggcagcgttttccatataagccgccgcccgtagatacaataatcaggatacacacagtcgctctctggtagtatcataaaaagtgtattatccgacgcaaaattaccacgttagactaatgttagtcaaataaaaaaatcgcccttttcagggcggtaatttttactcttaaacatacaaaaacccgcatacctgcgggcctttcgcaaaagctggaaaagggacttgaaccctcgaccccttcattacgagtgaagtgctctaccgactgagctattccagcttgtgtcaaacacaattgatattgtatcacattttggaaaaatttcaactctttttttgaaattctgcatgacattttggacaggtgacgcagattttcccttttcccttcggcactcttattttctgctggcaggatgggcaggtataaatatgaaaatcctttcgctgggacatcatatatttctcttttttaaactttccggtaacctttcctttcaattccagatacttctgattctcactgtatctggcactgtaatttctggaaaacatcctgaaataacacactcccagtaaaaacagccccggcagcagcaggatattttttctgacaaagagatccaaaattaaaaaagccataacaacaatcagaataaaccggttcagttgatccgtaccatatcttcctgacataaaattcctcaatttttctttcataatcagcagttagctccttccccagacagcttctcaaatactgaattcacaaagacagccgccttttccatgtcatccctgtccggatgaagcattgcctcatcaaaatttcgcagcagggcctctaccttagcgtcattttctccattcttcatagattcataacgctcccttatctgtatcggcatctttccctggcacataaaagcccccagatactcattgtcatctccgataaaagctttcacattctcctcaatgcgctgaaagtacttttcatttccgccaaatccacaggttccgaaaagtgcgattttcttattatgaagttcccctaaataatccaggatctcaaagcttgcagtccccttatcagtccaataccctataaaatatacgtctcccatatcataattcttctgtccttccagccgctgaatatctttatccggatcagggatagctgcatagatagcctttgccagcttttctgtattaccagttttgcttttgtacagtacctgcactttcatagaatccttcctctcctgttaatccttctgatacatacctgtatcatagcacacaatgagagaaagagatatttttaaactctaaaaaattgtaaattgtctataaaatatagtaaaatccagaaggaaccgcttcctagtgtctatcagttctctgcctagtgacgcggttccccttttattcttatatatacgtcttactcttcagaaacaggcgtctcttccggagcatcggcaggtgtcagttccatatatatctctgactgagagtattccggtgtctccggacttacttttagaacaccagttgcctctattctgctgccatcctcgtaatcctctcctgtaagctgaatctctttgatttctgccaggacagtatcgcctgatctaaagcctgccatctgatccagtactaaaaattgtgctgtatactgctgtccggaatccgaccaggtaacctcttttacagttccggctaatgtagattcctgttccagttcatactctgtataacctgggatgcgcttgccatcctttcccacataggtttcttcaatccactggctgacggccatagaaccgtcttccgtaagatagtaatctccaacccaccgggatgtctgaagagcccctgaggcgtgcagataataccaggtattatctaccagtatccagcccgtaagcataaccccgttttgatccatataatatctggtattccccacatctgtccagcctactgccatagctccgcttccctggagataataccaggtgttcccctgcttcagccagcccgtctgcatcgctccgcttccgtctgtataataccaggttcctccgtctttgatccatccggtcttcatggccccgcttcccggagcgaaataataccagcttccgcctgctttggcccagccttcggccatggctccgcttccctggaggtaataccaggtattcccctgcttcagccagcccgtcttcatggctccgcttccgtctgtataataccaggtctccccgtcttttagccacccggtcttcatggctccgcttcccggggtcagataataccaggttcctccaacttttgcccagccttcagccatggctccgcttcctttgagataataccaggtgttcccctgcttcagccagcccgtctgcatcgctccgcttccgttggcataataccaggttgatccgtccataaaccagccggttttcatactgccgctgcccggagtcagataataccaggctcctccaaccttttcccatccctcggccatagctccgtttcctttgaggtaataccaggtagtaccctgcttcagccagcctgtctgcatgataccgttgctgttggagaagtaccaggtagagccgtctttaaaccagccggtctggagaacgcctttcgaattcaggtaataccagttattgcttcgtctcagccatcctcttagacggactccggacgcatcgcagtaataccagcctccagtggtcagcacccagccggttctcatatatccgttcttgtcaaacacataccattcgccatttatgtactcccaggaattcacaggccaggaaccgtcacttttcttaaaccaccaccccttggaatcctttacccaggttccttttgtctctgctgccctggtttcactgagggctgcgggtacaggcagatcaccggcttcctgactgctgccggcatctttttccacagcttcctttgtagtatctccaaacacctgagcaggtacggtactcattatcatagccgctgtaagcgacagggctgccagttttattcttctatttttcattatttatctcctcactcctatgtttcatcacagaattaacagatttattataacattttttcttagaatatccatggatttatgaaaagatcactaaaaattcacacactgtaccagaagtacccggtatccagcgtgtgaattctattaatttcctcccatccagtcggcgggataggttacatataagaatctggccttgtcagccacggaaaactgaatcctgctgcccttgggtatcagaatcatctctccgggccctgccgtgacagacgcattgcccttgttaatcctaagactgccctctattacataatcaatctcgtcataattcagtgtccagtcaaaagtagtctctttcatctccatgattccgcagcccagccgcctgctctcttccagagaaagcacatcatgggtatatacctggtgtcccgggcttcctgtatccagtttatccccgggtgtaacctgtactgagggcagagccactttaatcactccgtctgcgtattctttacagctgtctccttccggcgtcaggccggacagcttttctgtcaggattctctgtactattttttctatttctgatgcagtaaattccattgtatgcctcctattactcagtcattcttctggagatgaataccgccagaataacagctgtgattcctccaactagttttcccacaatcatggggaaaatcatagcctgatggaatcccgcggtaaatcccaggtgatccccaaatacgaacgcagccgatacggcaaaagctacattaataattttacctctcttgtccatgtccttcatcataccaaacatggggatactgtttgccagactggcaaccatgcctgccgccgccacatcgttcataccgagcacttttcccagcttcatcagtggtgttctgaataccttagtaatcacatagaccaggggaaacgcccctgccaaaacaatagcgatatcagcgactacggtaaatccttcgctgatcggattcattccgggaatgagggtaatgcctgtcagctgttctacaatacctgcgcccagtccaagggtaatcactgccacaacaaatttgccaaaatacgtaaatccctttaccatggcatccggaaatttccatagccccagagcaatgagcagggcaaagagaataatcgggattaaattgcggattaccatcataacggaataccctgcaaccagacctcccacaaaggatcctatgggaatggtgataactcctgccagaactccggtagccagatacttcctgtcagattcctctataatacccagagccaccgggatcgtaaacacgattgtggggcccagcatggcacctacaatgagtcctccgaaatcaccggcattgggatctatcgccagagcctgtgcaaggggagctccgcccatatcattggccagtatcgaaccggcaaacatagcaggatccgcccccagaaagccaaagagcggtacaatcacaggcttcagcagatttgctatcaccggagccagggctatgattcccaccatagaaacagccagggctccaatggccataattccttcttcgaacttttccccaagcccaaagcggttgccgataatacggtcaattgccccaagagccgcgaaaaacaccataatatagataataatctcgttaatgctcatttcatgttcctccatcttccttgctgtcggattcctgcagctccagggaatctataatgcctataatcgctgcatctacaggaattctggaatctcccaccgcctgccgcgcggagttgcctttgctcaccagaaccagatccccgattcctgcccccgtaatatccgcagccaccagcagagagtctttcttctgctgccggtttctcataatattaactaccagcagcttctggccgctgattccttcatcctttttcgtggcccatacatttcctatgacttttccaatttccaaaagctcacctctttgcagctcttctcacatacaggttgtgattcgctatatagtctctggctaaaggtgtgaaaattgcttctcccctcactagaattgaggcggcacctctggcaggtgctttcataagatcggattcccgtatcagatgaagccctgtgagatccaggctctctccctccggctgaagcttatgaggcagatcgtctgctgcgatctccgagatgctttcaacaacagtaaccccgtatttaaccagcttgtcttcgtactcctgatactggagataaagatttttataagcagtatccctgtatctgtgatattcaattccttcccgccaggcaaagacctttttcccccggagcagtgcggatagtacacattttgcctggggggaataggggagacccagcgcagtctggaccagcaaaagatccgggagctccatcagaaaaattacatcatacctggagcactctaccgcttccttaatagaatccccgaaaaaatgcagcagatattgcgtttcgagatagttttttatctccggtccgggcgttcccaggataagcgcctccggtctcttaaaggatccagactctttcagctttttttccacttctcttaccacctgctccaccagttcctgctgccctgtcatccgccgttcctctctttgcctacaatacggcagaaggtgcccttctgaaaaccgcaggcattcgcttcatcatagtcaatatggacatccgtttgaaaatccgggctgacacgggcaatggtgtcttcaaatatgagaggtctgctgccgaacaccttgatttttaaagcatccccatctctgaccccgaacttttcggcatcctcaggagtaatgtgcatatggcgttttgccactatgacacctttgtctttaatcacctgccggtctttataagagaatactgccccaggtgtgccttcaatgtcaccgctcagcctgactggtgcctttattcccagagccagacaatccgtcatagaaacctctgcctgggtctcctttcgttccggccccaggattaccacattgtgcagagtccccttaggtcctccaagagatactctctcctggcagacatattgtccgggctgagataagtcccggactcttgtaagctgatatccggttccgaacagggcatcgatatctgccctgcacaggtggacatggcgtccggaagcttctacctcaaccatacagctttcctgtatctctttcaccactgcatctacaatgcggtcggctaatctttttttctcctcatcccggagtactgtaccgtacattgtccatccctccatccttggatctgtctttatcagatatattatcaatttcagtgtactgccaaatgatactagtatttgccggcgagatatttaaacatcataatccagaacagggaggaaagccggttcagcacccggataatgtcgtcccgggtcacttccccggattctgtcttaaatgccttgtatgccgcaagttctgtttccctggtcatggtcctcagtcggttcaggcaggcaacgatctcaccgtgctcacaggttggcagaaagtgtctcattccataataccggctgggatgatgggaatgttctcttagttcatccatggtcagcccctggattttctctgttttcacagcttctccgctgacttcacagcgaagcaggccgcggatcacccggataatctcctccaggtcctgtaccagaagattctttttttcttttgcggcagccaactgcacaagaataatctccgactccagagaatcgatggctccccggaatatgatacggggatggtccttgtagaccatctcatcccctctcagagtggtcatgtgctccggcttttttttctttcctgtatcccctcccagaatctctgagagggtttccgatacaatttgttccagcttttctgtcgtgatttccgccattttttatgcctcagaggtataggatgtgctgcttttctccagctggtgaggcagaatcacatccacctctgtgtggggtctcggtattacgtgaacagatacaagctctcctacacgctctgctgctgctgcaccggcgtctgttgccgctttgacagctccaacgtctcctctgaccataaccgttaccagacctgcgccaatgctttctttgcccactaatgccacgttggcggcctttaccatagcatcagcagcctcaattgcgcctaccagaccttttgtttctatcatgcctaatgcatttgtatttgccattttacaatccctccatctctttcgatacaagattagtattctacaattttctgttttctatttataaattacgatttggatgtctcctgccttggaatctccagtttttatccaatctccctcatgattctctcaacaattgactggacgaaagcagcatctgtcccaagagcacaggcgcctgacggttccggcacactgcctgcctctcttctaatctcctccagttctttggtcccaaacccaactcttttgatatttatcacatccagtggaccgatgttgttggaggttgaacttcctcccactgctccgcagcccagggtcagtgccgggaacagacccgtcgtcgcgccaatgccgcccagggcgcccggtgtatttaccagaattctggaggccggcactgcaagggcaaaccttttgatcagggactcatcttctgcatgaatggaaaaggtatgtcctgcaccctccatatgaagtatttctatagaacgtcgaagaacattttccgtattttcttctacataaaagcccagtatgggcgccagtttttctctggagtaaggtgccccttctcctacactggtttctcttcccaccagcactctggtcccggatggaatattggaaagccccgcatattcagcaatctgggccacactttttcctacaatcataggattcatggtcccgttagctctcaatataaactggcccagttttttggtatcctcctcgttcaaaagaaaggcgccctgcctcttcagttcctccgcaacgggctgctccatgcatttctcgacaataatggactgttcagaagcacagatagtcccattatcaaatgtcttggaatccaggatacgttttacggccatatgcacatctgcgcttttatcgataaaggcagggccgtttccggcgcctaccccgatggccggggttcctgaggagtaggcagattttaccattgctccccctccggtagccaggattagggatgtattctcatgcttcatcaattcctgtgtagcgggcatggttgggatgctgatagatgagatagcccctctcggacagcctgcacgaacggctgcctctgcaataacctcaacggttctgagaatacatttctttgcccccggatgtggagagaagacaatggcattgcccccttttaaggcaatcattgccttgtagatcaccgtagatgtggggtttgtggagggtacgatacctgctataacccctaccggcactccgatatcccatacctgacgctctctgtcttcatgcagaattcctattgtcttctgtttcttcactgcctcgtagactacctgagaggcgaagagatttttaatcaccttatcctgccatctgccgaatccggtttcctcattggccagcttagccagctctgtggcatgtgcagttcccgcttcgctgattgcctttacaatcctgtctatctgattctgatccatctctgccagcttttcggaagccgcttttgcctctttcagcaggttcctgacttcctgaacggacagcagatctttatcttttaagtccatagataatctccttttctcttattcaaattggctgggagagtctgccaccgcttttaccgcctgggcaaaagctgcgcaggctgatttgcaggctgactgggttcccgtaagcagtccgcccccgaagtttgtctcagaaggcggtccataaaaggaaaccatccttacgtcggcagcctttaacgctgcgtccagtccatagattgcctcgagaggaggggctatcagatatgccagggcctgcccttcccgaattcctgtagacttggagagatacgagccagttctggaaacagtatgggcataatagacaatagaatcatcctcattggcgctgacaaagcagctgccgttctccataaaatttctgattgactctaagccgctgcgcacctccgcaggactgggaccaccaattataccgattacctccccggctaatttggtggatgcattggcagatcctgcgtacatggactttgcatataccacgtccacatctgcatcctttgtagcttcatccagagcggtatagagaacatcatcggtatctgctgttacaattccgagacttttatgcctctgccccagtgaaagtgctcttaccagatcatcgctcacattggaaatcacccggacaccaagaatgtgagcccgtaattcatcatttctcatggcttgctttcctttctgttatttcagatcaataccggaagccttctgctccagcattttcataataatacctgaggcatgcgcccctgcttccactgccgtggtaccgcctttgtgaatattgctgataacggttctcttagcttctgccagcccatgacggggatggtaggcaatataggcagacatagactctgccgtaacaaggcccggacgctcaccaaccagcatacagataacttctgctcctgtaatctccccgatgtcatccatagctccgactctggcatatttgataaataggataggccccgtgcttatccctttcgctttcagcccctgggatatggcaggaatcatctcagcagcattcgcctctaccgcagaggatgaaaggccgtcccccaccacaataattaccttagggtgatctttgtaggcagcttttataatctctctttccttatccgcgaaccttcttcccaaatcggggcgggtcagatattcatccttatctttacattttgtttttacgaatacaaattgatgttttttgataaattcttctgaaacatcagagaataccgcatcctgagcagccgcatgatctgcccgcacacggagcatagtcgctgttttataccttgctcctgctcttccgattcccagtctggcgggagtcttggctttcatggccagatatccctccctgtccttcggttttttaaccagcagttgttttctcaaatctatctgggtaatatccggcagcatctgtcccccatcggtgctttccggcgctttttcaagtctgttattttgtccgccggatgctgcatagctgcttttactgtcagaggagatctgaagagatttccccttcagcatatcttctaccatttgttctactaaagctcttacatctgtatcctgcattcacctttcctcctttaaaataatgtggaggcatccccggcacgtcccgtcagatgacctctctcatccacataccccatacgaagcagccattcatggaaaggcctgattgctgtcaaaccaaagatttcccgaagagaagctgtctcctggaaacctgtcgtctgataattcagcataacatcatctccgtgaggtattcccatgaaatagttacatcctgctgctgtcagtaagaccgacagatcctcgatggtattctggtcagctttcatatgattggtatagcaggcatcacatcccatggagatcccggtaagttttcccataaagtgatcttcaaggcccgcacggtttacctgtcggccgtcatacagatattccggtccgataaatcctaccaccgtgttcaccaaaaacggctgaaaatgcttggcaaatccatagcacctggcttccatggtcacctgatccgcgccgtggtgggcttctgatgagagttcagaaccctgacctgtttcgaaatacattacgttagggcctgtggctgtccccctgctcagtgccatctggcgcgcctcttctatagttgccgcattgaaaccaaaagcagtattgcccagttcagacccggcgatggactggaagatcaggtctgtgggagcacccattttaatggcctccatctgtgtggttacatgagccagaacacaggtctgggtagggatctcgtactttctcttgatttcctcgaagcgtttcaggatacgcgtcacactttccgccgaatcatctactggattcagacccagcagcgcatccccagccccataggtcagcccttccaaaagagatgccataatgccgtccggatcgtctgtggggtggtttggctgcagtctggaggagagtgtccccgcttccccgatggtagtattgcagtgggccgtgatacgaatctttttagccccatagatcaaatccatgttagacatgagctttgccaccgcagccaccatctcagatgtgagacccctggatattcttttaatatcttctccggtatgagcttcatccaggatccattcccgcagttcggacactgtcattctcttaatttcattgtagatagattcgtttacatcatcctgtatgattcttgtgacttcatccgtctcatagggaactacagggtaattccgcagatcctccagtgtaatttcagacagtacaatcttggcggccactctttcttccgctgtttccgccgcaatccctgcaagcttatcccctgatttctcttcatttgcctttgccagcacttccttcagggacgaaaatgcatatacatgcccaaaaagttttgtttttaaaatcatggctttcctccattttccattgttttctatgaatgaaataccagggtctttaccaccacagggagaacacttccctgggcaataggcctcccgatatcaatataatctccttcctggagccttacaccgtccagacagacaacgtctttcccgtaccccaggagagcgtacatagactgccccagtacctttgccatatctctctccacaatgacaataaccggcagtccccgctccatcagggctttcatgcctaaaagcagctcgccggcataggtctgtacttccgcaaaagtagggttctctgcccccgtcaaagctaccgcaaccggctgcaggctgtcctctacctcaaaccattcaatcttctttctcagactttcagccaggttttcctgctcctcccttgggcttatcttcagcaccggaaggttttttacgggaaaagtatcttttgtgtaagtaattgtgcttccgctgatttctgtagtatggcttccggcgcctaccactgtagcccgaattctttctctgctttctatcaccttcatcttcctgcaaagctcagaccgtgcaatggcttcccccagaagtattccgatatccccatagcagaacttgtcttcaaacttacgggattgataaaccgcctccgccacacccccggaaaagctgatataaggaattggttctttgaattctattcccctgtgtgtgaccagaagctgataatattccccctggggcttaagccccacactcgcctccagagcagaaaccataatagcaattacaggcgccacatttgcctctgtagcgatatcacctaccgccagaggcagatgttccctttgaataatctcctgcagctttggggcaatataggtgattctgtgagtgtctgcatctgcctttatcaggcgccccccaatatccagacatccggtatcacaggtatctcccctctgaaataccgcaaggttactggtgccaccaccgatatctatgttaactaccgtggtatggtgttccttggaatagtcatctgcccctgccccttttcctgagataacactctccagatccggtccggcagtagccaccacaaaatccccggcaaaatccccaagggcattaaccacctctctggcattctcttttctggctgtctcgccggtgataatcacggctccggtatcaatttgctcttttcggatacctgcctttttgtattcatcgtccacaatatctctgattttttcaaaatcaatgcggttctgagattctcccagaagtggcgtaaaatatatttcacttttataaataatctgtttgtctgcaattaccatacggggaacggtatagctgctggccatgttttccacaattaattttgaaaaaatcaattgtgttgtactcgttcccagatcaattcctacactgagcagctcttccttcactgactttcccctctttctccagataatcaaataattccgggattcccacccctgcgggtgtgtctaccgtaaatataggccaggcgccccctgcctgcagctctcctttggctttttggatctgatcctgggttgcttccctgcactttgtaataatcccaatcaccttttttccgaatatactggcaaaaccagggggaattgcctgataagaggaagtggggtccgccacaagggcaattatccgtgcatcaatggccgacataatcaatgcattgtaaaaatgccggttttccagatattcccctggggtgtcaatggcatctccgtagcgttcaactgcctgtgtctttttataattcagctcctgttcgtggagcttttggcacagtgtcgttttcccgcaccctgtctttcccataaaaattacctttttcatagctaagacctcgtaacaggagccggtgcgaatcccaaatcctgttccagcgtccttagaatatccttaatagctgcctcaacagaactgatatccccggtaaataccaaagccccactgaatctgtcaatgaatccaagggtgatatccgatgccttagtagctatgtcagctgcaataattgatccctcgctgggagtgattgtcaggattccgatggcatcctgccttccaggttccaaccccagcttcacatagatatccctgtccggtcctgcaatcacatgtgccaaagtcacctgtttgccgggtacaaattcctgaattatccgctgtttttcctgctgctccattccatcaccgccctgtctctctcattaccaggcctgtctctctcattaccaggcctgtctgagaatttttattacatctgcccgggtaaccggcctgggatttgttgccgtacagccgtctgccagcgctcccgccgcaattgtttcttcttccttctgatagtccgcctgtgctattttacagtcatgaaatccctggggcatcttcagcgctttttccagttttctgatatgactgataagattcctgacacccgtgcgtacattcacgcctccaattcccagcagctcagcaagtcttgcatatttccttgccgccaggcagtactccttctgctgataatccttcagatcggcattgtattctactatatggggaagcagaatcccgtttgccctgccatgagggaccttgaatcttcccccgatgttatgggcaattccatgattcacccccagagaggtctggtcaaatgccattcctgccatacaggaggcatagtgcatctgttctctggcctccgtatcctctttgctttcaaaagaacggagaagatactgaaagaccgtaaggacagccttctctgcgaacgcatctgtaaaaaaattggctttctgggacacataagcctccagggcgtgggtaagtacatcaatgcctgtgtcagccacaatccccgggggaacgctttttaccaaatcactgtctaaaattgccacatccggcaaaagctccggtgccaccaatggatactttcttcccttttccctgtctgtaatcactgcaaatgaagtaacctccgatcccgttccgcttgtagtaggaacggcaatgaagtccatatccggcagatccccaatctttctggagaactgcataattgcttttgcctcatctatggctgaaccgccgcccaaggcaatgagcagatccgggcggaaggcaatgacttcattaactccctgcactaccagctccataggcggatccggaaccacattgctgaagatactgacttcctttcctgtcagccgttccgtaatcctgtctgccatctttgactccaccataaaagggtctgtaacaatgaatattttctgtgctttcagggtatctagataagaaagaggtgcctggccgaaatgtactgttgttttcaatccgaattccgtcatatctctgtcctcacattcttcttttccttgctttagtttctgtgagtttacggaaatttatgcagaatctgcaagaaaaaagaagaaggatccgtgcttaggcatcagatccttcttcttttttaatcatattctgtttttatcctgttttccttattcataacggcttaagaacccgctgtactcactgtgcccggtactgaaggcttctccgtccaccaaaatctctatagaggaagccccgtaggtatccagaaatgtgttaaccagagatcccatagtcatatcctccccggccgtgcccatagactgtacatactctccgaaccctgaggacagatccagacggagggcaggctctccttcattgtcaacctcttcaaaattctgtaccaccacactgtccggcagggttccgtcacccaccatctgaccgataatcataccaggagatacctcctcaaaatccatttcctgcttgttataaccatctgcattctcattgggtgagtagataatagcttttccgttttccgcaggaatggaggatgtctccttctcttccttaggtgcctcctctttgttctcttccttctctgtcttttgggtatcctgtccgtcttcctgggaagtattgctttctgcttcttgttctgtggtcttgacctcgtctcctgtaccgcagccggcgattccccctgtacccagacagaacgccaaaagaattgccgatagtttttttgctttcatagaatgcatctcctctcctgtcactgttccatgtggctgactctcacatccagtttgttgtatggtatttcgatatcttcctcgtcaaatgcaagttttaccttttcgttaagcctccacttggtgttccagtactcttccgtcttcacccaggcccgaaagccaataatcacagagctttcccccaattcatccacaaaaacaatcatctcctgatctgacataatacaggggtcctcgtgaagcagacgctccagaatcccttttgcctttttcagatccgactggtaggaaattccgattttaaattccagctttctcttctcctgggccgtaacattgaccacactcgcctctgtaagagtcccattggggatgacaatccgcttgttgtctacagtagagagtgtcgtataaaacatctctatcttggtaaccgttccctcctgtttactggtattttcaatgatatagtctcccacctgaaatggcttcagtgccagaataatcacaccgccggcaaagtttgagagccctccctgcagggcaaggccaaccgccacacctccggatgccagcaaagccgccacagaggattccttaattccaaaccgcactgctatggtaacaataagcaaaaaataaagtcctgccctggcaatagaattcacaaactgcacgactcccaggtcaatgcccgccttctccatagaggctctcagcaccttgcacagctttttgattatcttagaacagataaagtataccagcagcgccagaactacttttatggcaaagttaatcaccgtaggaagcatagcctcaaaatacgtaatcatcttgtgtacttccactgtttcagtatccatgcaacatctcctgttttctataacattttatccgccagctcttttttcagatttctcccggctgcagtctttctctttttcctggcagttttgttatctactaccttatccacttccttcctgtatgcaaaaatctggaagctaagaggcggcaccttaatcacaatggagttcttccgttcgtcgcactccgcttttttagacattttcaccctgggatttaccacccccgaaccgccaaattcctttctgtcactgttaaaaacctccttgtacttccctgcatagggaacaccaacctggtatccatcatactctacatctgaaaaattgcatacaagcagcagagtatccgcatttcttctggtctttctcagaaaggtgagcatatttttctcatactccagctggttgatccactcaaacccatccgtatcaaagtccaggtaatacaatgcgggatattccttatacaaatgccacagggccttcacatagttttgcatctgtctgtggggttcctcttccaacagttcccagtcaagtcccctctcctctgaccattcccgttcctgggcaaattcctgtcccataaacagaagctttttgccgggatgtgccagcataaagccataagctgccctgagattggcaaactttttctctttctccccaggcatcttattcaggagagagcatttgccgtgcacgacttcatcgtgggacagactgagcagaaacttttcgctgtatgcataaatcatactaaacgtaagttcatcgtggtgccctccccgaaagagaggatcgtagcacatataccggataaagtcattcatccatcccatattccatttgtagtcaaatcccagtccgtcctcctccaggctgccggtaatccggggccaggcagtggactcctccgcaatcagcagaacatctctgtgctttttcttaaatacagagttcagatgcctgagaaattcgatggcttccaggttctcattccccccgtagatattggccacccattctccgtcctgctttccgtagtccagataaagcatagaggccaccgcatccatgcggatcccgtccacatgatatttctctgcccagaatagggcattggcaatcagaaagtttgttacctgcggacggccgtaattgtaaatcaaagtcccccagtggggatgcattccctgtcttggatccagatgttcatacaggcaggttccgtcaaaattagaaagtccaaaggtatccttgggaaaatgcgcaggtacccaatcaaggattacccctatcccctgcctgtgtagatagtctacgaagtacataaaatcttcacaggtaccgtatctgctggtgggggcataatatcccgtcacctgatacccccaggaggcatccagggggtgctccatcacgggcatcagttccacatgggtatatcccatatcctttacatatgccgcaagatcctctgccgtctctctgtaattacagaaagtatccccggcccccggcctcttccaggaaccaaggtgcatttcataaatgaccataggttttttctcgtcattgacctgctttcgctttttcatccattccttatcttcccactgatagctctccagatctgctacgatagaagctgtgtccgggcgcagctgggcctggtttgcatagggatccgctttcagataagtaaggccgccttttgccttgatctcatacttataaagagccccgcattcaatttcaggaacaaaaagctcatagatcccggagacatccagccggttcataggatatacccttccgtcccaccggttaaaatctcccacaacactgactctcatggcgttgggtgcccacaccgcaaagtacgttccctctaccccgttcagggtcattcggtgagctcccagctttttgtagatgtcgtaacagattcctgcattaaacttttgctcctcctccggagtaatctgcgtgggaaatgcatacgggtcataaacctccaaggtctcttccttattctccacaaccagacgatacagaggaatattctttccgggtatcagcacggcaaagtatcccccttcatcctccatcaccatttcatacgtcttgccatcctttattacatgcacgctgactttttctgcctgcggataaaagcactgaatcaatatcccttcttctgtaacccggggacctaaaagattgcggggggtactctcctcagagtaaaccacagcttcaatctttggccaatccatcatctgatatagcttgtcttccattgtcatgcctcctgtcctcgttttaaaaaggtattcttttgttcattttatcatttttataatagaaagtaaataaatgtacagtataagtctaaaacctaagaattctgaacaaattataaatattataaaacaagcataaaattagcactcacccattgacagtgctaataatatgtgttataaaacatatagaacaagtaaaacagcaactgttatgaaggcagacaattgccaggataacataaagaggaataaggaggaatgacctatgttatttagaagaccttttgatttatttgatgaaatgttcagtgacccatttttcactacaccttttgaaaccgctggccgttcatctctgatgaagacagatatccaggaaaaagacggcagctatgtgattgacatggaacttccgggatataccaaggaagatatccaggcagaactgaaggacggttatctgacaatctctgcaaaccatacagagaacaaagacgagaaagataataaagggaaatatcttcgcagagaacgcttccagggaacctgcaagagaaccttctatgtgggcgaggatatcagacaggaagatatcaaagccgcgttccaaaacggcgttcttcgtctggcagttcccaaacagacacctcaggttttggataaggaacagcccaaattaattgagatacagtaatttacaaactctttcgatattgttttcctatacttctctattccagggcagctgcggctgccctgtttttcattacataagaactctgcttaaaataagttttttactttaaagtctctctcggcctcccgcctctgatccttctttgcaatatcctgtctcttatcgtaaagttttttcccttttgcaatccctatctctacctttacaagactccctttaaaataaaccttcaggggcaccagagtatatccctgctctgcgatcttagctgcaattttcctgatttcataatcatgaagcagaagctttctcacgcgcagaggatctttattaaagatattacctttttcgtaaggactgatatgcatcccgtagatatacacttctccctgttcaatcctaagaaaagactcctttatactgcatttacccatgcgcagggacttcacctccgtgccagccagggcaatccctgcctcatagctgtcctcaataaaataatcatgataggcttttttattatttgcaatcagacggctgcccgattccttgctcattctcctcatcctcctttccttcctttgccagtacaaaatctatggtcttggttatcatatcagcatcctctacccgtacggtcactttctggccaagtccataggtctttttcgtcacctctcccacaatccggtagtgctccttgtcaaatacatagtaatcatctctgagtgtgtttacatgaaccaggccttccactgtgttgggcagttccacatagattccccactccgtaaccccggagataattccctggaacacacagccgatccgggatgacatatattctgctttcttcagcttatctgtctcccgctcaacctcctctgccctgcgctccatggcgctggactggacagatacgtcttccaggatgtcctgataatggcggattttctcttcgttcattctgccccggagtgtttccttaatgattctgtgaatctgcaaatccggatacctgcggataggcgaggtaaaatgacagtaatatctggccgcaagcccaaagtgcccggtacactccggcgtatatttcgcctgcttcatagagcggagaagcagccgggaaaagagaggctcctccggtgttccttctattctctttaatattttctgaatctccttaggatgaatcttctgcttggactttacagccggaatgccaaagttatgaatcatctgaagaactgcttccatcttttcctcatccggttcttcatgtacccggtacacgaagggtatctctgcacggcagaattcctctgcaactgtctcgttggcgatcagcataaaatcttcaataatctttgtagccacattatgctcatacggatagatctccaccggtctgccctgactgttcaaaaggatcttgctttcggggaaatcaaagtcaatcgctccccgtttttcccttctctttctcagaagatcggatacctccttcatcaggaaaaacagcggaactaactcttcatattctccggctgcagatccatcctcctgatccagaatctttttcacattcgtgtaagtcattctcctgcttacccggatcactgtctccgcaatctgatgggaaactacttgtccggtttcgtcgatatccatcagacagctcaaagccagccgatcctctccctgattcagggaacagataccatttgacagacggggcggcagcattggaattacgcgatctaccagatatacgcttgtccctcttttcagcgcctctctgtccagagcgctgttatactgcacataattgctgacatccgctatatggacccccagatgatagatatccccctccttggtaagggatacgccgtcgtccagatctttggcgtcttctccgtcaattgtcactatcgtccactctctcagatccatcctgctgtcaaaatctcccggaatcagatactccttcacctttgccgcctgattgtttactttttccggaaattccataggcagatcataccctttggcgatagaaaggacatccactccagcctcattaaagtgacccagtatctccacaaccttgccttccgggctcttattctttgtcccgtaatccgtaattaccgctaccaccttgtcccctgtcacagcgcctttcgagcactccatgggtacaaatatatccctggaaaactttgcattatccgctatcacaaacccaaaatgactgtttctctgatatgtcccaaccacctggactgtgccgtgttccagtatcttaacaatactgccttcccgtcttcttccgtgagattccggtcccggggaaagaagcactctcacgcggtccatatgcaccgcattctctacctgggattccggaataaagatatcctctgtatccccggaaacctctacaaatccaaatcccttgggatggccgataaagatgccctcagcatactccctttccggttcccctttcttcgtttccttccgcacagggcagactgcatctgcttctctcctgccgtccattctctttccggttgtcccatccgctgccctgtttgaatccggctttttgccggaccttttctgatatctaccccgtttagtaatctcaaggatgccttcctctaccatcaaatccaaaacctcatggagttccttccttttccctttcggcagctccagtaaaatagccagctcctttgccctcataggctcgtattccttacagcttattatatcatagagcattttccttcttttctttaataatttagtattcacttcttctcctatctatctttcccctgaggcttcaaaagaaaaaaacactcttgttccttcacaagagtgtcatctgttaaaacttcaggtttaatactaatgccagtacaaaaaataaaaatcctgtaatcttcgtagcgcgaaccaggtttccttccatagatcttcctttgttcttgccccaatacgtatcggccatacctgcaatgctgcccagaccctgctgctttccctcctgcatcaatacaagaacagtaatggctatacaatcaataacgaaaattatggtcagaaccatacgtaaaatatccacgattacacctcctaattgtcaaacaagataattttaccatagaggtaaaagtttttcaacttgtttttcggaaatataacaaaaatcaggaggagaggggatacgcttccctcttccccctatacttctcagataaaaggtgtgtcgtactgggctatatttcccagagtatcctctattcgcagcagctggttgtattttgccgtccggtcagtcctgcagggggctcccgtcttaatctgtcccgcatttacggcaaccgccagatctgcgataaaggtgtcctctgtctctcctgagcggtgtgagatcacagcccggtagcctgccttatgggccatctccacggcatccagagcctcagatactgtcccgatctgattcagcttgatgagaatcccattggctacctccagctttataccgcaggcaagcctctttatatttgtcacaaaaaggtcgtcccccaccagctgcaccctgtcacccagcttttccgtcattagcttccagccgtcccagtcatcctcgtgcagtccgtcttcaattgagacaattgggaattcatccataagctccttgtaatagtttaccatctcctttgccgttcttgtgacggtatctcccttcatctcactctctccagggaaataatagtaatccttttctttgtcgtagagttcacttgcagccgcgtccactgcaaagcagatgtcctcacgaagcttataaccgctcttttccactgcctgacacataagctccaggacctcctttgacccctgaacatccggggcaaatccgccttcatcacccaccgcagtagccagattttccccctttagtatcaccttcagattatggtaaatctcagcgcacatctgcagtcccgaggaaaaactgtctgcacccacaggcataatcatgaactcctgaaggtctaccgtattatctgcatgctttccgccgttcagaatattcatcataggcacgggcattcttcttgcgtggcagcccccgatatactgatacagaggaacccgcaatgccttggccgcagccctggccacagccatagaaacacccagaaccgcgtttgcccctatattctctttatttttagttccgtcagcctggagcagcagatagtcgatgtgactctggtttaaggcattttcccctaatacagcatcggccagttttgtattaacatttgaaactgccttctgcacccccagtccatagtatcgtttatctccatcccgcagctctgctgcctcaaatctgcccgtagaggcacctgacggaaccagagccctccccagatatccctctcttcctactattccttctcctacggtaacctctacctcaacagtgggatttcctctggaatccagcacttctctggcgtatacacggcgtattggcaaataacgatacatatgcgtaacctccttattttttattctgtatttttattatttaccaaattgccggtcataatgtatataaaattattgtttgaggcgaaatctgaccggtgcataccgataaaccaaaaacaatgcggcaccgatataaagcgcagaaaaaagaatcgtcagacttgcaaatatgatggttggagcctgaattttaatgcacatataacacaaaaaatatgttgccccgtttacaatagaatacgtactgcttttcgcctccatattcacgttgtagggctggagcagataatagatcaccaggtgatgtacggaaaaaaataccgccatagccaggacagatacaaacagcagcccataattcagaggattatctgtccctcctgtgataaagaggagaagcggcagaccgcaggcaatcaccgccgcaggtatcatattaatcttaatcagtgttagcagccgtgctttaaaaagcttaagaacagcatccggctgccggtagaaccggtatgccagcatactgtgatcacagttcataaacatagcctgtgttaccaccgcccccttattcaccagatacatcacaaaaataaaataagggagaaaattaagcatcacctcattaatgccccgggaagctttgtgattgacctgtgaaagaaggagcattccggccagaattatcacaagtatatatgctgtttttctggctgaatgggtaagaatcttcctgtgtctttgtataaacagttcattgaagtaatcgtatccttttttatttcctgttcggacttcctctgaagaaattttggagagataggctctctgctgtgtggcagctgcgttttcctgtaccccgaaaataaggccattaagattcagtatttttttataaagccttttgtagcttctgctcttaataagaaatctcagggaacataccgcacacggaatcaggaggaccgctgccagataaaagccctgcacagggagacctgcatgcacccaggggagaccataccccagcaaaagccctgccccggtcacactgaagaaaagcttcaaattattttctgatacctcacggccggttctgtcaaaatacttcagcatcagtgcgctgcccacaagcttccattccgtcatcacagcaggaaccagaaggcagacgcccagagggatacctgcctgtctgcccagggtcagaaccacgggtatccaggtcacaatattcttagccaggaaccaccaaaggctggaaagagcatagctttttgcatcggtccgcataagtacaaccgtatagtacttggcttttgtgggattaaacagttccgtgtttgtaaatgctcccattgctgtaaggaaaaagaaaatatttacaaagtttcctgtcttatctcccggcaggatacttagaggcagtaaaatcattagtcccagatacaaaaatttaccgccaaaggcaaatatagttttcaggataacatacaaaatataagcgaactttttcagccccccgcagccatacaggcttgcagggattagtttcttaatcagcggcaggcggcgaagcctgtagatccaggtattcgccccatatgtattgctcaggcggaacgacaataaaagtgttttcatccttcttctccccttaaggtatcaataattttgtctttgaactcttcattatccagattttccttaggaatctcttccaaaattccttggtttagaatcacaatctcatcacacaaatccagagccagctccatgatgtgagttgaaaagataagaatgtgatccttttttatctccttcagcatctttttcatctcatctgccacaactacatcaaaggacgtcagtggttcatccaacaagagaatggcgggactgcctatgatattcaccaacatctgcattttattcttcatgccgtgggaatagtctttcatcagcttatccctgtcctcttcctctatcttcataaagtcaaaatactcatccagacttttagctactttcatcttctgtccgttgatctctacgaaaaaccttaaaaactctctgcctgtgagaaactcaggtaccacaggcgtagaaagcacatatccgatatcctctgagataatcggtcttttaattccctcctcctcaatataaaagctccccccgtcaatttcaatatcctcattgatacagttgaacagtgtggtctttcccgcaccgtttcgtcccagaagtccatagatttttcccttttcaaaggtaaaaccagccccccgcagcacttcttttttgtcgaatttcttttctatttgttccagtattagtttcataatgccctccattttctcttatctattaatgtatctcagcgccaaacggcagaagagccagcttagcaatcttaaaatgctggattccgaagggaatccccacaatggtaacgcagagaactgctcccaaaaccagagactccaaagccattggtacccctgtcacaatgagccagataatattgaggagcagagatccggcccctccgccgtagctcacctctttgccaaaggggaaaaaactgagctctgcaaatttaaagcactgtttcccaatgggtattccaataattgtaatgcaccacagacaccccaggaaaagccaggaaagtccgcttaaaaatcccccgcagataaaccaaagtaaatttccaagacatcccatatactatccctcctattctgctatatttattctatgctccatctgttccaaatcctctagtacggtccgaaccataataatgccgtcctctacctgttcccttgcctcctgaatcttattctgtaccatccagtctgcaataatgccgtcgaagaaaaaatcagcaaatgtaagaaaagtacctatctccatctgaatatccatgggaacctggatatcctttaattccttctgaaaatgcagcagccgttcccttgctgcctccaaacatctggttgccttgtccagcctggaatgcttcataatatctgccagaagtcctcctcccagcatatcccagatgcccatatttctggcactctgaagaaaatcctctgcttcctccagcgcttccaaagcctgtctgccggctgtctttgcctcttggatctcattttgatttcctgtcctatacatataaactcctttcctgcctctcggcaactgcaaggtttttgtttgtggcagatgatataagaatgattgcgcgaaagcgcagtctccgcctgcggcgggctgtcgctaacagcatcttcctttccgccacagtgtgatctcccggaggttttttattacataaggaacgaagtttcctatgtaataaaaaaagactcctatcatgacatcactgccacaataaaagtcttgcacatctcatttgatacgggtacttctcagtaccgggtgacggtttcaaacccacctttcggtgttcggctactcccttttatttgcttgataataatttatcatttctttacggatttgtcaagaatttttataaaatcctaagatttatttcccaatcagaagagatttgcctgtcatctcttttggctgctccattcccataagttcaatgagtgtgggcgcgatatcagccagacagcccccttctctcaaaccataggaaggatctgcattcaccaggataaacggaaccggattaacggtatgggctgtaaatggttcccctgtcttataatctaccagctgttccgcgttgccgtggtccgcacagataaacatctggccgcccactttcttcactgcctctactgcacggcccacacactggtcaactgcttccacagctttcactgctgccgcttcaattcctgtgtggcctaccatatccggattggcgaagttaataataataacatcgtatttatctgcctcaatagcctctaccaatttatcacaaacctcaaaggcactcatctcaggttttaagtcataggttgcaactttaggggacttcacaaggattctgtcctccccctggttgggttcttcaattcccccgttaaagaaaaaggttacatgagcatatttctctgtctcagcgatacgcgcctgggtcatatggtgggaagccaggaactgtccgaaggtattctctatggacactttgtgaaaggctactcccacattctgaatggtagcgtcatactcagtaaagcagataaacacaagatccagctttttctcccgggagaagccctggaagtcatcatctgcaaaagctcttgtaatctctctggctctgtccggacggaagttaaagaagatcacggaatctccgtcctgcatggatgccacagggactccgtccttttccaccactgtggggagcacaaactcatcggttttgcctttgtcataggaggcctgtaccccgcatgctccgcaggctgccttttctccttctccttttgtcatagcggcataagccttttccaccctgtcccaccggttatcccggtccatagcataataacgtcccataaccgtggcaatctggcccacaccaatctcctccatcttggcctgcagttcttctacatagccttttccggaagacggaggtgtatcacggccgtccaggaagcagtgaacgtataccttctctaccccttcccttttggccagctccagaagaccgtacaaatgtgtattatggctgtggacaccgccgtcagacaacaatcccataaaatgaagagctgtatccttttcttttgcatttttgactgcttttaagagagcctcgttgtgaaagaaatctccgtcctgaatttctttggtgattctggtgagttcctgatatacaatacgccctgcacccatattcaggtgacccacctcggaatttcccatctggccttccggaagtcccactgccatcccgcttgcgtttccctttacaaagggacactgagacatcagctgatccatcaccggagtttttccctcgcacaccgcgttggcttcacagttatcgttcagtccatatccatcgagtatcattaaaacagttggttttttcatttttgttctcctcattttgcttcacatgttcgtcttgttcctacagaaccttggaaaggaattcctgcaggcggggattctccggatgttcaaaaaaatccaccggattattctcttcttttaccttaccttcatcaataaacagcaccctggtggccacttctttggcaaatcccatctcatgggttaccactaccattgtcattccttccatagccagttctttcatgagacttaatacctcaccaaccatctccggatctaaagctgaggtaggttcgtcaaaaagcatgacatcaggattcatcaccagtgctctggcaatagcaatcctctgcttctgtcctcctgacagcatattggggtaagtatctgccttttccggaagtcccacacgttccaggagttcctttgcttttttgtcggcctctccctggttcataagtcccagtttggtaggagccagggtaagattctgcattacagtgagatggggaaacagattaaactgctgaaataccatacccatcttctggcggagcttgtcaatgctgcaggaaggatctgttatgttattgccctcaaaccagatctctcccccagtgggctcctccagccggttcaggcagcgcaggaaggtagattttccggaccccgagggaccgatgactacaactttctctcccttttctatcttctggtctatgccgttaagtaccacgtgatccccgaaagatttctgaagatttttaacctctatcactctgagccagcctcctttccataacattcagcagctttgtcagccccagtaccataatcagatagcagacagcagcgatgaacagcggaggcaggatgcggtatgacatatttcccaccagctgtgcggccttcgtaagctctgtaacagcaatcatacctgccacagaggtttctttaatcaatacaataaactcattgcccaaagccggcagaatattttttatagcctggggaataataatatagcgcatggtctttatataattcaggcccagacaccggccggcctccatctggccgatgtcaatggactcgataccggcacgtattatctcagctacataagctcccgagttaatcccaaaacaaatggctccaaccaccacctcattggtatttctcgaggtaaatatcaggttataaataatcagcagctgtaccatcacaggggttcccctgataatcgttatatagagattacatatgatattcagccacttcagatgcttattgtttgaactggccaccttacatacagcgatcacaagtccaatggcaataccgataataatcgcaagcagagagatctctatggtttttacaataccatttacgtacagcagatacctgtcatcctgtatcaaggcctgatatagagcagactgaaaattctcaaaaaaccccatctttaattacctacatgatttgctgtaaactcttctatctttccgtcatcttttaactgtttgatcactttgttgatctgatccagcaattcctgatttccttttttcacagcaatagcatatttatcctcaaataatgtaccgttcagaatagtgagcgtatcgttggaagcaaccatctcttccgcaggatactgatcaatgataatcccgtcaatttttccattctttaaatcttctactgcctgtgcgaacttagagtaacgtttgatttccttgggattggcattgtctttattggctacccagatatcagcaatgtttccctgctgcacacctacgatttttccttccaggtctgtgccggccacttcaccgcctgcaggtgtaatacccggattttctttgtttaccacaaccacctctgtgttatccacatattcatcggagaaatccatcacctgttttctctcctcatcaatggaaacaccggcggcaaccatgtctactttaccgctctgtaccgctgccagggcgccatcaaagtccatgtttttaatctccagctcttttcccatatcatcggcaatagctttggcaatatccatgtctataccgacaacttctgttcccttcatatattcatagggagcaaatccggcctctgttcctacaatcagcttgtcaccggagccacccttagtttcttcttttgcagtatcctctttctttgaatcactgcttcctgaattaccgcatgctgccagtgataccatcatcacagctgccattaatactactaacttcttcttcatagctaatacctcctgcacctttttatacattatattttataattattcacaaccattaattatatcggcttttcctccaaaatacaagctaaatatgcattcttctgcgcacttcctcccgcagccggctaatcctcatgatggtaaacagagttaccgcaatgatcaggctgcatgtcataacaatggctgaccaggttatgcccggagcccctgtaataaagttcttaatactggcatcgatccccacacaaaaaatccccagggcaagtactaccgccaaagccataaacagaatagatctggagagaaaacgatagcagagattcaccgccatgataagcaccacaccgattattataataggaagggcaatcagacgataccactctcccccgtcaaacagatacgcgatgattccgcagtacatggcaaccgcagctccgtcaaagaggagcatgaggaaaaagggaagttttcggtatatcatggcgggtataaagaagatccagaataccacacacagtccgataatatacaaagaccaggcattcatctgaaatataaataagtttagaaggccgcagcccagagccgtacaggttaatattacggtaatgagtattgcaaggtccgtccgctttaccctggcaacctcaccccgaatcccaggatagggggaagcaggtttgctcttttcttcttttaccggatgatataccggagtattacacaggggacacttctccagcgaagcctccagctccacaccacaattcacgcagtatgccatagtctcacctcctgtttgattgaatctttacatgaattccgtcttttactagtttccgaaaaaaatatcgttccacgtctgcctcaataattgagcttgcaaaattgacagatgtcactccctgatagctgacaatggcacagttggtcctggatgaaaatggctgccccatcagcacatcaaagccctcaatatacttttccatatcaccgggcactttagcgatgcctagattcgtaaggcctgcagaggactgtttattctgtactttaatataaaactggcgcacaataagatcctttatcagcagaggaaccatacggatccagatgctctgctgcgtattggcattcttagtgatatctgcattcagaaatttagggttgatataatactgcataaaatgatgcacctgctttactatctcttcaaaggtatattctcccaggcggggatcaatcccagggtacagcatagttataaaatttctcatagtcctggaaggaaagaaatttctgagattaacaggcatggcaatctttaccggtttctctttccataccctgtccgccctctgtttctccagaagggcatatagcagtaccgcattcagatattccgtgattgtcacctgatagcccttggccactgccttgaggttagtgacgtccatagtgccctttataatattcagcgtataaaaaggttcctgtgtcccatgtatccgataagcattcccctggcttcgcttggacggcaccctggagttcgcatatttaatgtacgcatcctccagctcctccggatccggctgttcttctatattcagaacaccctctccgtccggtatctcatatcctttcatcctgagatataccgctgtcattgttttcaggaagcagagtcccccattaccgtctgcaagagaatggaaaacctcaagtgatatctgatttttgaaataatatactctgaacaggtaccggtctttgctcttaatccggataggcatacagggattttgaatgtctggctgtacttttggcgcaggattggtattgggttccagatatctccaaaagagaccttttctcatggccaccttcatgcttggaaatctgggcagagttacatccagtgctttctgcagaagcactggatctacatcctctttcagggcaacagagattcggaataacgatgaaaatttacgtttctgtaaagttgggtacacattagccgacagatccagcttgtaccaggtttcttttttattcattagcttctcacctcttatgggttctttttattatagaggttcagaagccatattacaaggggaagaagagctttcttctccttgctctctttggccgttaatgttactatatagaaaatatcgaaagagaggacacctctatccatgccatttatgagcaaaagcaaccagaattttatgaaacttatcaaagccgttcacagtcttgtggtaacggatgacctggataaaaaccgccagtcccaggacagcataggcaagattctgggaaccagaagcaaagaggccgcatataccaatctgaccattgactcagtccctgtggaaattgtgagtgtaaaccgccctcacagtacccagaaagttatcctgtactgccacggaggcggctatattaccggcagtctccactacgccagaatacttaccaccaaaatagccatggccacctccatggatgttatcagctttgattaccgtctggctcccgagtttccctttccggccgcattacacgatgtggtcaaaatctgggattatctgatgatgctgggctacggaagcaaagatatcatagtcatgggggattccgcaggaggtaatctggccctctccctgggcctgaaattaaaggaagaggaacgctttctgccgggagcctttgttctcatgtccccctggaccgatctcaccacctccggcaaatcccatgtcaccaaggaagcattagatcccattctggatcatgaatatatggacaaggcccgctactcttatactaccgaagaaaactttgagaatccccttgtctcccctctgttcggagacttcacagatttccccccggtttatattcaggtgggaaataatgagatcctcctaagtgactccgtcaggctgcacaagcagcttataaagcagggcgtttctgcgaggctggatttgtataagggaatgtggcacgtgttccagatgtcgaattttaagacagcgaatgatgcggtggatgagatcgccaggtttgtgtttgaattatagtttatatgcctaaagttcggaggtatagagtcggcgagcagagcgtcgctgacggacggtcaagggagggggtcttggcgccgaggacaggcagggacaatacgtagatctacttgctactgcgtttctcctcagctaactgcttagccgttcactaagaagctcaggagagccttcgctcctaagtgaccgctggcagtggatcttcggacgcactccgtagtctgcgcagatctacgtattgtccctgcctgtcctcggcgccaagaccccctcccttgacctggtttaccctcacttcaggcatatggaaaacgggggggaaaggttgagagttgtacacttttcctcttatttcgcactattgtccgcttgatgttttggataaatagccaaccccctggaactccctatacccaggtgagaggaatcctgcggtggtgggctggctggttcgggcgggagggaggcttaagttccggggacgattccggaggagtgagtagagagtcttaggcaaaaccgggattcacgctggagattttttcggcagtccaagccgaaaaaaagtgagcatgggcagagaatgcacatcaagcattctttgcacatacgaacggtgctccggcggggattccggttttgtcttagactctcttcacgacggaggtgtccccggaacttaagccttcctcccgtccgaaccagccagcccgctgccgcgggatttctctcaccgtccccccgccacctcacactttccgacttgaatcactttaagctgaagtccaagcgctacactcctaattcccaatttaataacaaaagggaccgccccacagcagtcccttctttcacaaatactatttgtaatttacaatctgtccaaactcagccttcaaagaagcgcctcccactaatcctccgtcgatgtcagcctgtgcaaacaattccggtgcggtcttggcatttactgatccgccgtactgaatgcggatagcttctgcggtggcttcgtcatagatttcggcgatgcatgcgcggattcctgcgcatacttcctgggcctgttcggtagtagcagtctttccagttccgattgcccagattggctcgtaggcaatgactgctgtcttagcctgatctgctgttactcccaggaaccctaccttaacctgctgacggataaagtccatagtcactccctgctctctctgttccagagtctcaccacagcacataatgggtgtaattccatgctcaaacgctttcagcatctttttgtttactgtctcgctggtctctgcgaaatattctcttctctcagaatggcctaatacaacgtattttacgcctgcatctgtgagcatattcggggaaatttctcccgtataggcacctttttcctcataatacatattctcagctccaacctgaatattggtgccttttgtagcttccactaccgggataatatcaattgccggtacacagaacaccacatcaacctcttcgctttctaccagaggttttaatgtattcaccagctctaccgcctcgctgggagtcatattcattttccagttgccggctacaatttttcttcttgccataatgggataccttctttctttttcttttataattatttatcgtttgctgctgccacaccaggaagctccttgccttcaaggaattccagggaagcaccgccgccagtagaaatatgagtcattttgtcgccataacccagaatatttactgctgccgcagaatctccgccgccaatgatcgtagtagcatccgtatctgccaatgcttttgccactgcttccgtaccatgtgcaaagttcggcatttcaaagcagcccataggtccgttccatactactgtcttcgcatctttcacagcatcacagaaaatcttttccgtctcaggtccgatatccataccttcccatccatccggaatctcacctttgggagccaccttgatattgcagtcatttgaaaatgcatccccaatgagattgtcaacaggaagtaaaagttttactcccttatcttctgcctttttcatcatatccagagcatactgcaggtagtcgtcctcacagagagatgtaccgatttttcctcccatggctttggagaatgtataagacattccgccgccgataatcagagtatctaccttatctaacagattgtcaataacagaaatcttgctggataccttagctccgcccaggattgccacaaatggtctctcgggattgttgactgcgttgcccaaaaagtcaatttctttctgcatcagatatcctaccactgcagtgtcaacaaactgcgtcacacctacatttgagcagtgagctctgtgggcagttccgaatgcatcattgacaaatatgtcacacagagaagccagatctttgctgaaggtttctccgtttttcgtttcctctgcgcggtaacgggtgttctccagtaagattacatctccgtccttcatagattctgccgctgctcttgcgttaggtcccaccacctcaggatctgccgcaaattttacttcctgtcccagtaactctgtgagacgctttgcaaccggtgccagagagagttccggcttaggttctccctttggtttgcccagatgtgagcagagaatcacttttccaccgtcggcaatcaatttcttgatggttggcagggctgccaccagacgattctcatctgttattctgccttcctgtaaaggcacgttaaagtcacagcgaaccaggacttttttgcctttcacattaatgtcatccactgattttttattaagcattacatgtattcctcctatgattaagtgtatatagacaaaaaggtccggtccataatagaccggacccttatatgagtctttattcttcttaattatttctctaacaatttaccaaaatatttgattgttcttaccatctggcttgtataagaattttcattgtcgtaccaggaaataacctgaacctctgtggttccgttatccaacggcagaaccatagtctgtgttgcatcgaacagagaaccgaatctcatgccaatgatatcgctggatacgatttcgtcttcgttgtaaccgaaggattcatctgctgctgctttcatagctgcgttgatctgctcaacagttacattgccgtctacaacagctgttaaaatagttgtagaacctgttggtgtaggaacacgctgtgcggaaccgattaatttgccgttcagttcaggaataaccaggccgattgccttagcagcgcctgtgctgttaggaacaatattcactgctgctgcacgggatcttctcaagtcaccttttctctgaggtccgtccagagtcatctgatcgcctgtgtaagcgtggatggtacacataataccggatttaataggagcaaggtcatttaatgcttttgccattggagccaggcagtttgttgtacaggaagctgctgaaatgatgtgatcatcttttgtcagagtatcatggtttacattgtaaacgatggtaggaagatcgttgccggcaggagcagagataacaactttcttggcgcctgcttttaagtgagcttttgcttttgctttggatgtatagaatccagtacattccagaacaacatctacaccgatttctccccaaggaagctctgcagcatctgcttttgcgtagattttgatttcttttccgtcaacggtgatggaatcatctccggctgttactgtatctccaagtgcgtatcttccctgtgttgagtcatatttcagtaaatgggctaacattgtaggagatgttaagtcattaatagctactacttcaaatccttctgccccgaacatctgtctgaatgcaagacgtccaatacgtccaaaaccattaattgctacttttactgccatgttatttattcctcctattggtactaaaaatttttgagtttctcagattgttaaagaaacatcaacctacagagtattctacataatatatggaaaaaattcaagcataatttaaatttttattcttatttaatggaaagaatgttataataaaatcacgtaatttattggttaaaaaggagaattttatgtactcagactatcatttacacacaaacttttcaggtgattctgatgctccaatggaaaatatgatcgaaaaaggtatagaaatgggcctaaagattatgtgttttaccgaacactatgaccttgattatcctgagattggcatcaattttgaagtaaataccagggaatatttgtgcaaatttttaaaactaaaggaacaatataaagagcaaattaccctttattttgggatcgagctgggtcttcagcctcaccttgctgaagcataccacaattatctcagggaatacccctttgactttgtcatcggctcttcccatcttgtgaaccatatggatccctatttccctgatctctttcaaaacagagacgaaaaagcagcctattacgattatttccaaaccagtttggacaatgtttctgctttctctgagatggatatttatggtcatctggactacatagtacggtatggtcccaacaaaaacagagattataattaccataagtatagggaaattattgatgaattactgaaagctttagtggaaaaagggatcggccttgagtgcaatactgccggttttaaatatggccttggacatccccaccccaccgaagaaatccttgtcagataccgggaattagggggagaaatcataacccttggctctgatgctcacagtcccgaacacattgcgtttgcttttgataaaggggccgaaattctgaaaaactgcggatatcattactacacagtttttgaaaaaagggagccaaaattcataaaattagagtgatttttaaagaaaaaaggagtgatttttaaccattttttatggttaaactcactcctttttatcagcaaattgttcccccgcctgccacatattcattctcataaaacacaaccgcctgccctggcgtaatcgccctctgaggggtgggaaaggaacaggtaatttcatcctcacccgttctttggatgatgcagggagaccccttatggttataccgaatcttagctgtcacttctttttcctcacctgtcttcagttcctccatagccataaagttcagattgcagcaggtcagacggctggcaaagacctcctcactgttcccaatcactacctcgttggtgtcgggccgtatctcgagaacaaatacgggatgtcccatagaaagattcaggccttttctctgcccgatggtatagtgggtaattcctctgtgacgccctaccacctcacccgaggttgtcacaaaattaccttcctcaacttttttctccgtgttatcttcaataaatttggcataatcattgtccggaacaaaacagatctcctggctgtccggcttattagccaccggaagggccagctgcttggccatctcccgaatctcctctttggtataggctccaaccggcatcagggttcgggacagctgttcctgtgtcagattgtacaaggcgtacgtctggtcctttgcagctgtcgctgaagtcttcagggtatatcttccgttcttcagcctggcaatctgggcatagtggcctgtggcaatatagtccgcaccgatatcaaggcttctcttcagaagggattcccactttacataccggttgcaggcaatacatgggttgggagttcttccccgcaggtattcagcgacaaaataatccataaccttatccttgaattctgctttgaaattcatgacgtagtatggaatatccagaacctgagccacccttcgggcatcatccacagcacttaaaccgcagcagcctccgttttcctccagtgcggcttcctcctcatcctgccagatctgcatggttaccccaatcacctcatatccctgctctttcagaagccaggcagccacagaagaatccacccctcctgacatgcccactaccactttttttctgttcattaatactcttcctcttcttcctcctcagaaatatcggtttttggtttttccaatccctcgattttaatatgatttttttctgcataatcccagagggctgcatggatggcttcttctgccaacagggaacagtgtacttttacagggggaagaccgtcaagagcctccattaccgctttattcgtaacctctaatgcctcctggatggtttttcccttcaccagctctgtggccatgctgctggtggccactgccgccccgcagccgaatgttttgaatttacattcattgataacccctttatcatcaatatccaggtacattctcataatatctccgcactttgcgttccccacggtacctacaccgctggcgttttcaatttctcctacatttctgggatgttcgaaatggtccattactttttcactatacatattattttcctccgttattccatcattattttatctcatttcccggatgcttttgcaagttttttcatgtgatcttcatataaaggcgacatacttcttaaccgggctacaatttctttgattttttctattacaaagtctgcatcttcctttgttgtctcctcacttagcgtcagtctaagggaaccatgggcaatttcatggggcagcccgatggccagaagcacatgggacggatccagggaaccggacgtacaggcagaaccgctggacgctgcaatcccttccatatccagcataatcaaaagggactctccttcaataaactgaaaactaatatttatattattgggcagacgtttcttcggatctccgttcagacgggtataagacacttcggccagaatcctgcgtatcatgtaatcccgaagttctgcttcttttcctgtcctttcttccatcgtctgtgcagcccgcgcagcggctacaccgtatcccacaatacccggtacgttttcggtcccggccctgcgttttctctcctgggcacctccatggatgaaggagcgtatcttaactcccttgcggatatagaggaatccaattcctttgggtccgttaatcttatgggcgctggagcttaacatgtcaatgttcagtgcatctacatctatgggcacctgtccgaatgcctgtaccgcatctgtgtgaaaaaggattccatgctccctggcaagcattccaatctcacggaccggctgaatagaaccaatttcattgttggcaaacataatagaaatcaatatagtctccggagttatcgccttctccagctcctccatctttactatgccattctcatccacatccagatatgtgattcttgctccccgtttctctaggtactcgcaggtatgcagtatggcatggtgttcaatttttgtagttataatatgattgcctttgctgctgtaagcttcaaacgcagcttttaacgcccagttatctgattcgcttcctccggctgtaaaataaatatccctggagtcggctcccaaaaccttggctatcttttctcttgcttctgtaatagcctctttgctttttcctgcaatttcatagatactcgaaggatttccgtaattttcagagaagtatggcagcattgcctctactacctccggtgccgtttttgttgttgctgcattatccaaatatatcatttttcccattgtcccatctcctaattctcacatatttgagcgcttacctgccctttgtcccgaatcttccggctttcctctaccagctgatccagcatgattgtatctaccgcatctttaatactgtcattaattctctgccacacgtacctggtaacacagagatccgcaccctcacaggagctgttttcctgattgcccgggcaggtaactgcttccaggttaccttccaaagcccttaaaacatcccctaccgagatttcttctgcaggctttgccagcatataaccgccctgagcgcctctcacactgctcaccagtccggcctttctgagctttcccaccagctgttccagatagctgtaggatatgctctggcggtccgctatgctttgaatggatactgcctcattctcactgtataaagccagatcgatcaaagcccgaaggccataccttcctttcgtagataatttcatttgtacaccctctttttaatttctgctttaaatcatacttatttaattcctacttatttaattccgattgttttactctgatttcaattgtagattagcacgattcccaggttctgtcaagatactttcaggaatatatttatgaaaagaagataggtcgtcatctatgaacaataaacaattcctgctgcgaggcacaatcattcttacgctcaccggtttcttaagccggatcataggattcttctatagaatattcttatcacagacaattggtgcagagggaatgggaatctatcagctgatttttcccattcactctatttgttttgcggtggctgtaggcggtatccaaaccgccatctctcgttttgtcgctgccagaatagctttaaaggatgaacagggtgccagagatatattctttataggtacatttctctctgtgcttctgtctctttttatgtcctggcttgtatatcacaacagcccctttatcgccgtccggcttctgggagaggagagatgtgtctctttgctgcagcttatggctttaagtgttcccttcggcaccttccactcctgtgtgaacggatattactacgccagaaaaagtacagggattcctgccgccacgcagctgctggagcaatgtgcccgtgtagcggcatcctacctgttttatctggttcttctgagggacgggcgggctctcacgcctatgatagctgtcatcggtatccttggaggagaactggtctctatgcttgctgctgttctgtttatcctctgggattttaacaaggcatcctaccagctttcaaaaatgacagcaccctttcaccatttaaaagagattgtcacgcttgccgtcccactcacgggaaaccggctgctgatcaatctcctcaacagtgtggagtctatcttaatccccggcagacttcggctttttggtctggacaatacgtccgcactgagtatttacggcattcttacgggtatgtcactccctctgatcctgtttccctccgccatcacaaattctgtttctgtaatgcttctgcctgcaatcgcggaagaacaggcgaaagaaaaccatgcagccatcagtaaaaccatagggatgacaataaagtactgtctgatcttaggatttgtctccaccggatttttcttttttctgggggatacactgggcatacttctgtttaaaaatgaatttgcggggacatttatcaaaactttatcctttatctgtccctgcctttacctttccactaccctgaccagcatcctaaacggcttgggaaataccacgctttcttttatccaaaatacaatcgggctggtcatccgcatcctttttgttctatttgttattccgatctacggaatccaggggtatttatggggactgctggtaagtgaacttgccatatccggattaagtcttttctttttgcggaaatatatcgacatttgaatttgaatgtattataatcgttttggcgatattgtatacacacaaaggagaatatatctatgagttttgaatttataaaaaagctccccacccccaatgagatcagggagcaatacccaatgacggaaaaaatggctcaggtaaaagcacagagagatgatatgatccgcaaagtaatcaccggggaatccgataaatttctggtgatcataggtccctgttctgcggacaacgaggatgcggtctgcgattacacctcccgtctggctaaaatgcaggaaaaggtagccgacagagtggtcatcgttccccgcatttataccaacaagccccgtaccacaggagagggctacaagggcatggtacaccagccagatcctggtgcaaaacctgatatgctggccggcatcctggcgatccgaagaatgcacatgcgttctatagaggaaacaggcctgacttcagcagatgagatgctttatccggaaaactggcgctatctttcagatatcctttcatacgtagctatcggcgcccgctccgtagaggaccagcagcaccgcctcacagtcagcggcatggacgtacctgccggaatgaaaaaccccaccagcggagactattctgtgatgcttaattctgttgtggcagcacagcacggccacgatttcatctaccggggctgggaagtaaaaacctccggcaatcccctggctcataccatcctgagaggttctgtaaacaaacacggaaatgccattcccaactatcactatgaggatcttcagctgcttctggaaatgtacggggaaagagatctccagtatcctgctgccattgtagatgccaaccattcaaactccaacaagcagtacgaacaacagatacgtattgttaaagaggttcttcacagcagaaaatcttctgccgatattaagaatcttgtaaagggagttatgatcgaaagctatattgaaccaggctgtcagaaaatcggaaaagaccaggtgtatgggaaatccattacagatccctgcctgggatgggaggagtctgaaagactgatcgaggatattgcggaattgtgttaaatgatagttttgtgtatgtaaagttcgagataaaatagtcggcgagcggagtgtcgcagacggacggtcaagggaggaggtcttggggccaggggtactgggtggatctgcttgctactgcgtttctcctctgctaactgcctggccgttcactaagaagctcaggaaagccttcgctcctaagtgaccgccggcagtggagcttcggacgcactccgtagtctgcacagatccacccagtacccctggccccaagacctcctcccttgacctggcagagactcacttcacattcacggaaaacggggggaaaggttgagagttgtacacttttcctcttatttctcactattgtccgcttgatgttttggataaatagcgaaccccctggaacttcccttactcaggtgagaggaatcctgcggcggtgagctggctggttcgggcgggagggaggcttaagttccggggacgattccgcaggagtgagtagagagtcttaggcaaaaccgggattcccgctggagattttttcggcagtcagggccgaaaaaaagtgagcatgtgcagagaatgcacatcaagcattctttgcacatacgaacggtgctccggcggggattccggttttggcttagactctcttcgcgacggaggtgtccccggaacttaagccttcctcccgcccgaaccagccagcccaccgccgcgggatttctctcaccgtcccccgccatccaaacctgccgtcctgaatcaccttgagccgaagtccaagcgctacactcctaaatcccaataaaatacctgacaatataaaaagaaacccccaatctcacccgagtctgataatcatccaagtccacccccgtaagatacttcagtctggcaatccggtatagtaaggtatttctgtgaatatataattcttctgccgacgccccaatatttctctcatttctgatatacacctctaacgtatgacaatactctgtatgatgttcccgatcataatccaggagacggaacactgctttgtcgcacaccatcttcatatccacatttttctgccccaaaaacagaagatggagtactgcgtaatgccggtagctcacaaaaggcttcttcagcagttctctccccatatctaaacagataagggcctgtctgtaatagaccgatgaacggtagaacccatcaaattcatcgctgagtcccgcatatcctccatttttttcaacaaaaacctccaaaagcttttccagcttctcaattcctttagttccttccagtgaaaaaatagttacaatttccccgtccataataaccggcttgctgctgtgcatgttttctaattctgcgcacataacctctgtctgtatctcatcttcctcttccggaagataacgcatgacacagtaccgcccttccatatcccacatcagcggagcaagctgtctgtttatctcctctttttccttgagtgttccgcttacaacgtgatgaataaaattttcataatcttttcctctggagatcgaatatttcatatctttttccagtgccagaagcaccatcctgcccaggtaatctgcataagcttcatccccgggggtaatttttttgaaatatcctacaataaataagtgcccacgtatctttccttcccaacggaggttatagttgataaaggggttgttaaagctgtccagatgaaaaatcacagccttttcataagaatccatcagtcggatttcgtccgctcttcgcatctgatccagtatatcgtaggaaagatatccataggtgactagatgcttccaaatagcgctgatttctgatagcactggggctttatcaatagccaacactttgaaactggaatctaccaggtacgcagggttccccatgattttggaaaaaagctgtatcatctcctggagccctttctgtccataaatcaattctttcagctgttcttcccactggttcatttcctcaagtacatcctgtgcctggttcaatatgtaacttacctcctctccttctgatagctgaaaggcgaaaaaaccggggtctccctccaatttacaaaccagggcagcggttcccctctcatattccgccttttttgggatggcagggccaatatataaataatcctttttcagtctctctgtgtgttctgagagaaagcgaatccctttaaccattaatgtgcggggacagacggggtgactctctgtctgaagattcatccgatccaaaagtgtaatcagaggcagattcataatttatcctttccctttctattgtatattatatccaaatattataaagtggaattcatatttgatagacaatttttcagtctattttttgatgatataattattgtaacacaaagcaatggtttttaggagtacaaaaaagcaatacagcagagagaacttatgcaaaacctacaatatcaaggaggtatatcatgaacaaagaagaattacgggctgaaagagaaaagagagtggataccgcgattgcgcttcaggaaggtgatcgggtaccttttgttccaaagatgagcggcttttatatgtatgggtatggcatttctttttatgatgctatgaaggacgcacggaacatggagcctggattccggaattttatgcgtgaatatgaaccggacgccgtgaatatcggcggtatctactcgatggatgctctagaggctctgggaactaattatctgcgatggccaggtccaacccacggtctttccctggattcttcctttcagcatctggacgaaacttatctgcaggatgaagaatacgaggaatttatccaagatcctacgcacactaccataacgaaacttttgccacgaaagcacaaaaatctgaaaggacttagccggctctatctgagggaagtatacgatgcgggattttttgccgatcttagtgtgttctcagatcctgaagtacaggacgctctgcaggctctcatggcggccggcaaagcatcccggcagagggcagaacagatggcaaacgtgagaagctggattggggaggaaggattctctacctactgtcagggtacattttttattccatttgacgcatttgcagacagcatacgcggcatcatccgcaccactatggatatcatagaattccctgacgaattagagcgtgcggtcaataagataaccgagatgaacgtggaacgtctggtgaaaatctacaaatccagaggtgccaagagaatctttatgccgctgcactgcggggtagatgaatttatgagtctggcaaattatgaaaaatattattggccctgtctgagaaaatgtatcatgaccgttatcgaacatgggatgactcctgtttgcttctgtgaagggaattacaatactcgtctggatacactgtgcgatgtgcccaaaggaaaagtggtttacatgttcgagaaggttgatttgaggcgtgtaaaagatactgttggaaaggtagcatgtatctgcggtacacttcccaatgccctcctggcattcggaaccccggagcaggtcgttgaagagacaaaaagacagctggatattctggctccccaggggggatttattatggactgctctttgatgcttgacaatgcaaagcacgaaaatatgcatgcctggaaagaggcaaccttaaaatatggacaatactaaaacagacagatgcccggctcacccatagccgggcatctgtctgttttattttctcgggtgggctttgacatacacatccctcatcttattcattcccatattcagatatatctgagttgtggaaatatccgcatggcccatcatctcctggacactcttaatatccgctccattctgcagcagatgggcggcgaaggaatggcggagcgtgtgaggcgtaatatcctgctcaatccctgcttttaccgcataactcttcagcactttccaaaacccctgacggctcataggttttccggaacagttgcagaataaaatatcactttcattcccatccagcagaatatcccggtactttcccacataagatgtcagtgctttcctggccatatttccaaaggggatgattctctctttctctccctctccggagttacagataatataccccagatgcaggttgacatcctttactttcaggtgaatcagctcgctgacacggatgcctgtggcatagagcaattccagcatcgcccgatcgcgaatccctttgggagtcaccttatcaggctgcttcaaaagtaaatctacctcttccacactcagaatccccggcgttttcttctgaatctttggtgccttcagatgctctgcaggattctccgcccttatcccctccagatacagatactgaaaaaaggcgcgtatagatgctacgctcctggatatggtagagggggcaaaatgttctttttccagatacatcatataagaattcaggtttgttgaagacaccatacagatatcatcttctccctgacattccagatagtgcaccatcttttttaaatcccgctcgtatgaaacctccgtattccttgatatgtttttggtattatgtaaataagctaaaaaattttgaattgcatcgtccatatggcgtctgtccttgtcttgcgtattataaaagcaattcacccttcaatgaatcataagagtattataagcagaaatgcccagaaaatcaaacacaatttttacggaaaaaccgcttattttcaaggttttttgcgtatccacaacatatcggatctgtcctggaatctttgcaccatatatagtaaaatttctgtaaactcttttttggaaatattttccatgcagagtctaaagcagtgttttcacatacaccagtactttataattgacataactctccataaagataccgcataaataaacaattcctatggccatcaaaaagaaaatatagctttggtaacgctttcttccgatgctctgccttttccagaatttctgcgacatctggtatactatgaaaaaaaagctcagcgtagcgggtatatagaagaagcactgaggaacaaaacaggcactgcccaacagcaatcctctgattccatattccatcagaaacatggtcaaaagactgcctgccaaaaaccccagccagagaagccctcccactaccaggggcactccgaaaaaggtaaccccgcccactccataaaaaaggaaccaggcgcctctgttctccagaagtctgcaaaaatactttcctgcggaataatccggatccgcctgactcataaaatacatccccagcagattggaaggatactgaaactccttatgcaaaagatttgtacctataattcccagtatgaatccaaccatatatacacagacaaacgctgtaaaatgctttttgatatcctggcttaacattatattcatcgtcactcaccctcttatcaatgtatgtgacgatcactcctttttatgtctggtatccatgtattattttttaagaagtttcgaaaatctgttccggatatcttcttttctctctgatgtggctctctcgtccctgtacagaatcccttccttctctttgagcacatccccctctttcggctgaaaatccagcgtatccaggggaatctcctccatctttttctgcaaagtttcacatactgcaaaagctccttcaattctgtctacaatccattttttcttttctcccatctttcttttcctccctgttatggattacatttgctgcagggcgtcaggcctctcgcctcagcctcccctcttgcaatttcctgcgaactgtttctcaaatattggcaccctgctctgtggtatttctctcctgtctctgttatatagacaatatcttcctcttccccctgaacagtatcctgcgcttcctctgtatccttttcacggttatcctgattaacaggctctgcatcctcactgtctgtttctgtctgccgtacgcccgcttccatggaacgggaaggctccagattccaggtaatggtgtttccgtcgctgaccgctgtaacggtaccctgctcgtctgttcgaaacacagatatccctctgtcgcggaatgcatccagaacagacagatccggatgtccgtactgattgtctttcccacaggaaattacagcgtattgaggctgtacagcgtccagaaacctgctgctgttagatgtttcgcttccatggtgtcctgcctttaaaacgtctgatttaagggtcagaccggtacttagaatatccgcttctgcttcttgctccccatctcctgtcataaggaaactattgccgccgtttaccagccgaattccaaccgaccagttattcagtgtatctccatagtccttatttggggataggacagtaaagcttcccccgcccagtgtataggtatcgcccggctgtgccagagtaatctccaggttcttctcttcaactgccccaagaacatcttcaaaagtctgtgaggtatgtatcttatccggaagaattacagttcctatatgaaaagcctggatcacttcatccaatcccccgatatggtcctcatgagggtgggtcccgattacataatccagtctgtcaacgcccttttcactaagaaaagatactatggcatctccatcctcatttttgccggcatctaccaacatataatgtccttctgactgtataaaaatgcagtccgcctgccccacatccaaaaatgttacctccatggaactttctgcagacgagacttcccgtacagcatcttcctgaacagtctcctccccggtatacgcactctcctcagcctcattctgacaccctgccatagtcaaaagaatccagaagatggctgccagccatagggctgtatgttttttgatttttcctttcattttgtgtcctctcctcctgcactgtctataaaagccggaaactggtttttcctgttccagcttccggcttcctggttttccgtcatggacagatgcctcaggcgatataagcgtctaaggcatctgccacatacgcaggcaagtctgttttttctatgtaatggcatctcactggttcccagtcaaattccttaagctctaaaagatcttttccgtccagaaccgcaataaaaatcgtctgtggctcatcgccgcctccattatagacaaaaatcttttttgtctgttcaggcttcttggatgccaattctgcgatcaacagtccgttcctggttattatcttaagcttatctgctgctccctcctggggatacataagctctaatgccctctcataggcatgggacacttctgtatccacggtgaagtcataggaatgcttcttaaagatctgttctgccagccggactcctttggcaagcatatcgctgtccagctccaactgtgattgcagctcctcattgcgttccgtcagtatcctcagcagctgtgcggcatcaatgaagtctccttccgtgccatagattgtattcatttcataaatctcccttcgctcgtatatatgctgtcactattatagcaccatcaggttaggaaaaaaagatgaagatcccttcccaaatgaattagattctgcatctggaaaaattctgtcatttgctgtatactttaatatacagcaactgtcgtttacttgtcaaaggatgcattaatatgagccttgaagattttgcatacagcagctgcaatccgatatgacacaaggagccgatgatggaagaacatgtacacgataaggacaatgaatacaccctgacatttgacagcaaatgtcctgcagacgcaagtaaggtaatacataccgtaatctacaaaaaggccacttgtacccgtgtggatgatattatccttcactttcactgcagccgggattcgaaatgtgtaaaatgccagcataattatctttaaatcaaggatttcaagagaaaagagcctgacaagacgggctcttttctcttatatttattctgctgcaattttatgtaaagcatcctcaattgacagtccctgcttctggatttccaggtacagggcagccatttcctcttcttctttcttctttttaagttcctttaattcggcttttaagtcttttaattcagcctccttatccgcaatttgctgctctacaaactcaattctctggagagtcgtcatattttttggtcttcttcccattgtggtgtcctcctgtaattttatatttctatcatataacttacatccccctatagcaagtcaaacttttccactttatatgacaataacttcctctgagagcaacacaccaatcatgtacgctaaaaaagcccttaaaccgctgcttttcagcaatatcaacggtttaagggctttgccactacaagtaagtacctttatttcgcgtaatcaattacgcggctttcacgaattacatttactttgatctgtcctggatattccagttcagcctctatctgcttggagatatctctggcaagcaataccatatctgcgtcgctcacatgatctggcaataccatcactcgaatctctcttcctgcctgaatagcaaaagatttgtccactcctttgaaagagtttgtaatgtcttctaattgtttcaatctgtttgtatatgtttctaaagtctctcttctggctcctggtcttgcagctgaaattgtatctgctgcttgtacaatacaggcaatcagggattctggttctttgtctccatgatgggattctactgcattgataaccgtgggagattctttatactttctacataagtcagcaccgatctgaatgtgggatccttccacttcatgatcgatggattttccaatgtcatgtaacaggccggcacgttttgccatacggacatctgtaccgatttctccggctaacaggccggatagctgagctacttcaatggaatgctttaatgcattttgtccgtagcttgaccggaatttcattcgtccaagtaaacgaaccaattcaggatgtataccgtgaacgccaacttccagtgtcgctgcttctccttcttcgcgcatcatggtttctacttccttctgcgccttttctaccatttcctcgattctagccggatgaatacgtccgtctacaatcaatttttccaatgcaatgcgtgccacttcacgcctgatcggatcaaaaccagataatactactgcttccggagtatcatcaataatcaaatcaacgcctgtcagcgtctctaatgtacggatgttacgtccctctctaccaatgattcttcccttcatctcatcgttgggaagctgtactactgagatggtagattcagctacgtggtctgctgcacatttttgtatggcagtaactacataatctttcgctttcttatctgcttcttcttttgccttgctttccagttccttataaagcttagcggtgtcaatttttacttcatcttctacagattttaacaaatattcttttgcttgttcggaggttaggcctgagattctttccagctcctgtactccttgatcatgtaattcgtcaactctcttttctttcttctttacatctgcttcttttgttgcaatttcagactcacgtctctctaacgcatctgcttttttgtcaatcgcttcctctttagacaaaacgcgcttttcatacttctgtacttccgcacgtctctcctttgtctctttttctgcctcattcttcagcttcaaggattcttcttttgcctctaagagagcttctcgtttcttagtttcagccgttttcaatgcttcatctattatgttccttgctttgacctctgctgtcccaatggtttctgcatccttttcgatctttttcttaaccgctacatttgcagtaaccggaatagctataagcagcgcgactaacacagcaacaattgcaatgattacacttgcacctgtcacaggagcacctccttattaagttttcattgtacaaatacaacagttcaattttatactgttttaacaattatgtcaagctttcatgcatacttttatacaatataacaatgtttatgaatggtacaaacagaagggcggaagtttgtctattactgctcctccgataagacatcccagatatctgagctggagaatccccgtcttgcaaggaatccgtaaagtctcagcttttccttttcactgagacgttcctcctttttcttctttcgaaccagctcccggatctgctctctggcttcgggcagcgccgcctcttctgctgcctcagcaattagttccctggaaatccctttatgggacagttccatggcaatcctccgaaatccttttttttctttctgggattctatatactttcgggcatactgcctgtcatcgatatatccgtaagattttacatatgctacagctgcctcaatcacgcacgcaggatgaccgtcattcttcagtttttcatacaattccttttccgttcgatccatctttgtcaaaagatgcatggctcttagctttgctcttttttccagtacctcactgaggatctgccggtacgtatcttcttctatctcttcgtgtatccggatatgataacgggacagctcgcccttatataacataaaagcaagctgtccgtcaatctcaactttatattttttcttggttacaggttcaattcctgtgactatcatacatcgctccctgtctcttccctgctgtcaggcccctgtccttcctgcgtcgctccggctgtcaaaccgtaatgctccctgaccttctgttccacttcctccataatctgagggttctctctcaggtactgcttggcattttctcttccctgtccaatcttgccgtcgtggtaagcataccaggcaccgctcttgttaatgattcccacattggctgccagatccaatatatctccctctctggagatcccctgtccaaacatgatatcaaactccgcttccttaaacggaggtgcaatcttattcttaaccacttttatgcgggttctgtttcccacaacctctcccccctgcttgagggcttcaattcttctcacatccaatcggatagaggaataaaactttaatgcccggccgcctgtagtcgtctcaggattgccgaacataatccctactttttctctcagctgattgataaagataacaatacagttggacttgctgatgactcctgtaagttttctcagcgcctgtgacatgagcctggcctgcagtcccacatggctgtctcccatatcaccgtcaatctcggccttaggcaccaaagctgccacagagtccacaattacaatatccactgcaccggaacgcaccatggtttccgtaatctccagtgcctgttctccgttatccggctgagatatgtataaattatcaatatccacaccaattctcttggcgtaggcaggatccaaagcatgttctgcgtcaataaatccggcgattccgccccttttctgtacctctgccaccatatgcagggctaccgtggttttaccgctggattcagggccgtatacttctaccacccttcctctggggacgcctcccaggcccagggcaatgtcaagactcagtgaacctgtggggattgtctccacgttcatattcaccccggagtcgcccagcttcataatagaaccttttccatactgtttctctatctgtcctatagcggcatccaatgcctttaatttatcctctttaatcattgtccgtctcctttttgttaacgaacttatgttcgtttttcaatactattatactacacttttttttaattcttgtcaacctgttattttctcaaattcactcttatcaggacataggcatcccaccttctatctgctgttatctgctggaatagtttggctgattcgccggaaaatttagaaatgtacggtattaaagtaacatgaaaaaagggataagtcaaggggttactgacttatcccatatccgtcaaaggaccatgttctcccctgatccaggctgatataacggcacatcattccggaaaatggagcatattcatcctgccctacatacatcaccaggtgttctccctcctgccacggcgcccatgccatggaaaaattggcagagtaataaggaaccggaagttccactgacatctgcgtccaggaggctcctccgtcctccgtgcggtaaaaatccggggtttcatggctggttactgtgataaatcccacctcgtcgctcacaaaattcacatcctgcgtgagaaatgtcccgttttccgacggggaagcacacagctcccaggtatcccctccgtccctgctgaccaatacctcctggtattccgagcccattgtcttatctcctccggtaactgcatagatactgttttcagtgaccgacagaaagctgcgccttacggcaatccggtctgatacctttttttcctcccagctttttccctgatcccgggaaagaatcattgttacaggctttccctcttctcccccatacaaaaatgcggtgaatccaggagtgataacatagctgccctggtccagagccgccggcacgccttggctttctatatctgtatgcacaaaaagagcttccatagtcacaggaactgctgtccagctttttcccctgtcataagagacactgagcgtctcctcctgaatctggtacgttccttctttttctctgggaacagcaggccggacaaacggcacctgagtgtctgcgacgcttctggcatcctctgtctgcacaatccctttcagttcatagacataatcagatacctgctctccgcagacagtcagagcgcatggaatgacatcctcctgccaggatacgccatactctttgtaaagagaggtttctgcgtccggcacgtgcagattcacaacggtttccgccgcatatgccccccgatcccctgcgatgagacggcagtccaggacttctgcgtaatctatcctctgttcaggtgtaagctcctcatacgtcccgtgttgagcagtcaggccagtaaaataacgattcagcatttccctggcagtatcccaaaacatatccggatctgcacagggaacctgatacggatcatcggagcgttcaattgtggattcctccacccgttcgtattcatcctttacttctctcaccagaccttcattgacaggggacaaggcgcctatggtctccagtgtctcctgatcaaatgcaggaggaagtgagtatttatcaaaatcccatccatatgcggatgtctgcccttcactctccgtttttccgaaaagttgattcgtatccttcagcagagcctcaaaaaacattggcttttcacagccgccgagtatcaggacaaaaacggctatcccagccagtgccagcttccttccattcatacaccattccccttactttttgtatacatatcttaccggagtaatctcctcctgcctgcccacacagtagacagaaaggctcggcccctttatctcccattcctcccgggagggcagcgaaactgctccatccttatcaataagccggatccctgttgtatcggatccccagttataattgcctttgtagagcagtccgtattccttctccttccattgagacacgtcttcctccagaggaattttctccatcatagtttcaaggatggcgaaatcgctgtccaggtcatagactgtcccatcttcctcaataccttccaggttttgtaccctgacatacagacttttatccttttctctgtcataccatataagataatttctgtggggtttataattaccgtcaaatccatataagaacatatcaatagtatcaatggtgccgtctgcctgaaaatgtacagagtaatctttcactgacaggtgaggggatatttcaatccttctcccaatacgttccatcataccttccagtctgatctcataaatattgtcactgtcaaggctcaccttgcgcacactcttccactgttctatcttccacgacagcttaccgttataggaaactgccgacttgcccacggcatacattccaaagactgtaataaggccccacagcacaagaacagtccagcgaagaccgactttccggatatgttttttgctctccagcagctgtctgagttcacctctcatggattcctgaatggctgctttctctacaggaataaaccgcaggtctgtgaaatacaaaaatacccactttttattctccctcagtcttttcagctccttccagggaatacaatttttaacgtctccgtctttttccataataaacacttcaatagaagtaaaataaagtaagtccccgtaatttgtcactttccggtgtatccgtctgtctccccggaacaagaattccaccataactccaatgaaaaacagcagaagcaaaataaaaaacggcaggtttctcttaagcatcccatattgcgccaacagaaacgtcacctgccaaaaggcaaaatacgctaacagaatcaagggattccatacatgttcaaaaagcagttccttccatataaatctccggtagtccttgtctgatacagtatattttaagtgcataggcattctcccccgacgcagccattcagccgattgtaatataatctcctaatatttgctattatagcatattttgcccgtaaaaagaagaagatgccaggggcttcctgccgctgacctcttcttctcttttatacactgttatgcaaatgcaaaatcttcggaaacctgttcctggttctgtaccatattggcaatcatccggggaattgtcttatctcttctgtagctgatatgtacctgatgcccgaagaggcagtccacccgcatcccctcttcttcaaacaaggtgacatgttttcctatgatccgctgaattctttcatcaaaaacaattctgctgtcctttttggactgatatacctttctctcgtactccttgagccccccaagctccaggccattaatcgtcatctggcggtagagatcccgcacaagaggatgctcatgttcctgcatccatacaatattaccgtccataaccgcctggcattcttcgcgggtcagggtacagcaatacttatatacaacgccgttctggacatttttcttttccagatagagaaattcttcatgattttcttttgtctttctgcacagataataacggggaagttcttcatcacgggatatgtatccttccacattgacaaactccatttttcgaaggagcatcctctcaaacttatcaggtgcctcttcctgtaatgtcttttctattctccggtaatcgttttttgttattctgccgttttcctcgtaataactcatatacttcataccataacctccatatacattcccctgttgcaccatatgatcctgacaaaagattcattccatcagacttctgtcagggctgacgcctgccatagttatactatacaaaataattgtgacaaagggatgaccaacttctgaaaatcctataaactatattttatttccataaaatggaggttcaatatgagttttctgcagccaatgaaaaagaatccgtttatagaccgggtctataaacggactcctttttaaaccagtttattactgcatctgcggctgttcaaataaagaacgaacatgggcaacttcttccggagttgccttggaagccggaacgtagtaagccttcgctcttgcaatctggtaaatctcttcctgagacatttcacactgattgcggatctgctttaatgtctgttttaactgtggattctctgactgagaaatcatctcagtgtaacgtactaattcgccgttaatgcctgctaaagtatcggataccattgttttttctgtcattttctaacctcctaccgtaagaactgcatcagctgttgcttagtttccattgcggactgcgcagatttttgaaaaaactgctttacctgaggatcctgagcctcatgggcataatcctgcatcttacagtgagtggtttcgtagccgccgattaagtggcgaagattctgaacgtctaattctgataaatctgtcataacataacctcctgatattttctatactatggtagtatggcagatttatcaggttttatacggttttttggctgttccagttaatagccaatcagccagttatacatttcctcatattgtttcgccgaactgttccaggaataatctcttgccatggcacgatccaccattttattccactctcttttcttgtcgtagtagactttttccgcatagcggatggtggcgagcatttcatgggcattgaaatttttaaagctgaagccagtgcctgagttctcgaattcattgtaaggctccacggtgtcttttaagcccccggtttccctgactatcggaagagttccgtaacgcagactcataagctggctcagaccgcagggctcgaacagagaaggcataagaaatgcatctgcggatgcataaatacggtgagacattgcctcgtcataataaatattggcagatacctttccattgtatttccaggcaaaatgccggaacatgttctcataatgttcttcccctgttccgagaataacaatctgcacttggtcctgacaaagctcatccataatataggaaaccaggtcaaagcccttttgatcggtgagacgggatacaacaccaatcatcatctttttaggatctgtctcaagtcccagatctctctgcagtgcagttttattttttatcttttccttcctgaacgttttggcatcataagtttttgttatatatggatccgttgccggattatattcatcgtagtcgattccattaacaatacctctgaggctgtttgcacgggccctcagaaggccgtccagcttttctccataaaactctgtcttaatctcttcggcatacgtattgctcacggtcgtgatagcatcggcaaagacaatcccccccttaagataattggcgtctttgtatgcttccagcttgtctggcgtaaagaagtaatccggcaacccggtgatttcacggacggtctttacatcccaagtcccctgaaatctcaggttatgtatcgtgattacacttttaatttctctgtagaagtcacccagctgaaattggtctttcagataaacgggaatcagtcctgtctgccagtcatggcagtgaataatatccggtttgaaatcaatcactggaagtatagacaatgctgcttttgagaaaaatgcgaatttctcaaggtcaaaccgaatgtccccgtacgggcgatatcctgaaaaataatattcattatctatgaaatagaagtgaattccttcgtattccagctccagaattcctacatattcatttctgtatcctatatccatataaaaatgagctacatactgtaactgattcttaaattcctctttcatgcactgatatttgggtatgattacccgaacatcaaaatattctttatcgaaacatttgggcagggcacctacaacgtctgccaaccctccggttttaataaaaggtaccgcctcagatgctacaaacattatctttttcatatgttatcctccttgagtaagaacattgattaatgatattatagcctatttttaggtagatgaaaaggcggttacaggatcttactaattatttttgtattctaaacgaattttatctgcaattaaggcaatgaattccgaattggttggtttgccttttcctgtacttactgtatatccaaacagttcatcgatggtatccattttccctctgctccacgcaacctctatggcatgccggatggcacgttctactctgcttggagttgtctgatgtttttttgcaatggtcggatataatattttagtaattgagttaagcatctccatgtcatttacagataaaatgatggcatcccgcagatactgatatcctttaatatgtgcaggtacgccaatctcatgaataatatttgtcacatcagcttccagatttctttcgaaataatcccccttgttttcgtaagcatttacttttctcagctcttttgtctttccgctcatggtattttttatatgtttgatacgattcaacagcatattattgtcaaatggcttcaaaatataataatttgcgcccagattaaaagcatcttccgtaatctgttcctgtccgacagcagatacaacaataaatgcaggatgttttttgatttctacatctcttcccacccgttccataactgacagtccgtctaccttcggcataataatatcaagcaatacaacatccggctctttttcacgtataatctcgtaaatatcttccccattacttgcgtgtcctaccagttccagctctttgtcttcgtttatgatatttcccaacaaatccagcattttttcattgtcatctgctatggcaacattcaatttttccattactactcctccatatttcctcatagttctcggttgtcgtcagaaatttttgggcgccctctcttcttcatttctgagcgataattgtattatagtatttattctttgtataatcaagttgaatccgctgacaattctgtgtattttccgtcacatttcgacattatagacattatttctccttctgttttcagcttaccccagcatattttcaatgaagattccgtatccttttgtagcatcctgaacgaaaacatgagtcacagcacctatgattttcccgttctgaatcaccggactcccgctcattccctgcacaattccgccggaatactccaaaagttcagggtctgtcacctggatggaaaatgccttatttgtatctgcctgatcccagaaaatctctgtaatttctatgtcgaactcttttgtttctccttttacggtggttagaattttggcacttcctgttgtaacatcctgtttcagccccacttccataggtaccagatgcagtgattcccttgattctgcgggaattgtgccgaatattcctttttcgctgtttatgtcgattgaccccagctgattgctcttttgataattgatcacaccggagagctctcccggatttcccttagaccctttcataacggagagaatctccgcctggtataactctcctctttccagtttgaggagttctcctgtgtctacatcgctgatgccgtggcccagtgctccgtagttcccatgggcgtccacataggtaagagttccgatgccttgtgtgttatctctgacccaaattcccagcttataagaattatcttcccctaaaagtggtgtaagtgaaagcggaatctcctctccattcctgtccacaagtaactccatcgtctccccgttgctgtcgtgaatcatggagataagctggtttttattggtgatgtctgttccattggccttcataatgtagtcaccggcctgtacaatatgctcagccggctgataggcaataccgtccgtcgatactacatccccagacccaatgatcattactccctctgtctccatatacaaaccgatgggagtacctgatgcagctacccaggtatcctctacgatctgcaccttcacttttttcagaggcattacatgacagagacggcactctatggtgtaggtcttattacccgcgacagaaagggaatcatcatacgtgatgagagggttctgttccaggatacttgccagtccgtcctgttcttctgcccggattcgcacatcatccggaattgaatctctgatagaaatatagctgtaaacaccaattcctattatattcaataataataatacgagtagaaaccgtctataattacgctttctatgcaaaatatcacatcctttcaaaaaaagaaaaagatacaccatcgtgtaccttttttagtatgtgattatttgcttatttcactcttgaatttttttgtacctgtgccaaatccttcatctcccgtgcactctctaaaaccgtactggtaatttttgcacccccgagaatccgggcaatctcctctatggatgcctcctgaccgatacgtcgtatccgggtagtggtttccatatttgtcacttttttttcaataaggtagtgtgaatctgccattgcagcgatctggggaaggtgtgtaatgcatagcacctggtgatttctcccgataactgccattttttctgataccttctgggctgtcctgccgctgatgccggtgtctatctcgtcaaaaatcagtgtccccgtctcgtccttgtccgccagcagagtcttgattgccagcataatacgggaaagctctcctcctgataccactttcgccagaggttttaacgcctctccgggattggttgcaatgaggtactccacagaatctgttccctctgcagaaaaatgttccttttcagaaaagttcactttaaatcttacatccgcaaaattcaggtctcttaagccctctgtaatatttaattccagctttaaggcctcctcttttcttttttcagaaagctcccggcaggcttcggacagttttttttcttctatattatattctgtcattaatctggctttttcagtctcaaaatccaacagacgagccagctgtttttctttttcctcaagctgaatcagaataagctctatgctctgtccatatttcattttcagatgattgatccaatccaggcgctcttcggtttcatgaaactcttcttccgaataggagaagttatccatgtatcctgagagttctctgttgaaatcatttaatagagcttctgcatcacttaaaacactgcagagaggtgcaagggtatcgtcatattcagccacctgagtcatctgatacagacttcttcccagtagatcgctgcacccgttgtctgctgcacacatctggtaaacctgagcagcgttctccagaattttctttccgttgatcagctttcgatacctctgctccagttccccatcctcaccgttcttcaggtctgcgtctgtaatctcctgaatctcaaattccaaaaacgatatttcacgcttcctctgttcttcgtccatttggtattccgccagttcttcctgcagttttttgtatctgcggtaggcctctttgaccttttggctgctgtcttccagattatccttcccatattcatccagtatctccagctgctttgcgggatataataaagactgatgttcgtgctggccatgaatgtccaacaatttgcccgccgcttcccgtatctgggcaactgtgcaggcttctccgtttatcttactgatgcttctgtttccagtaatctttctggtaatgataatctgcccgtcttctgcaaaaatatcctgttttttcaattcttccagaattttagaattatttacagaaaacaccaattccaccagcgcaaagggtgcattttcccggatcatatcccgggacatcttacctccaagggcaagactaatagagcctatgattatagacttacctgctccggtttcaccggttagaatattaagaccttcagcaaaatccacttcaatttcatctataagtgccaaattttttacgtgtaaattaaccagcatatctttgctcctttacactctcttctttcgatgtttcttcagttttccaggatccgccggatcttctccatgagcagcagtgtttcatcaacactttttaccgcacacatgatggtattgtcccctgcaatacatccgacaatctcttcccagttcagttcatccagggctgcagcggccgccatggccatcccggatactgttttgattaccagtatattctgagccatatccatggataagaatgcgtctttcagcactctggtgtatttttcactcatattctgattcttgttttcgagaaccgcatatctggaacgtccgattccatccgcaatttttgtaagtttaagctcccggatatccctggaaatagtggcctgggtaaccttatagccagcctcctgaagcttgtcggcaagctcttcctgtgtttctatatcatattgattgattagttcaatgatttttgaatgtcttgctatcttcatgttttgtaccctcccgagatgttatcctcacacattagctggtactcattttttgccgcagtacctccaaaaagctcagattacttatctttataatctgggtatctggtttggctctgcgtatcactatgcgatctccggttgtcatggtgagatccgtatccccgtcaaagcttgcgatagccttggcatctccttttgatttcccctgggcgatctccaccgtaatctcatcctcggaagaaaatataatgctccttgtgttcagcgtatgaggagctatgggtgtcatcataatcatagaagcgccgggggatacaatgggcccgccaacagaaaggctgtatccggtggatccggtaggcgttgagattataattccgtctgcagtgtaggtattcaggaattccccgtttacgtaatttttgaacctgaccatcctcattgggccgtccctgacaatcacgatatcgttcagggcaatatctgaggctataatctcatttccccggtacatatcccccgtgagcatcattcttcgctctatctcgtactcatcccgtatcagatgatcaatggcaggccctatggaatcacggtctatctctgccagataccccagtgttcccatattgatacccagcagagggatctgacggtctatcacatccctggctgcctgtagcagggttccgtccccgcccaggacaataacgcagtccgcatcttccggaatcagcttaacattcgtatagtgatagcctgcatttggatcccggtctctttctgtctgtatggtacactggcatccctgtgccttcagatagcccacgatctcttttgtcactgtcaatccttcatctttactgctgtttgtaattatgtagaattttttcatacccctcacctgtcagtctaatgtaccgtgtgccttttctacaatttcttttatttctgctgttacctgcctttgtgtatcctcttccccggggaattttaccaaatgcagcaaatattcgatatttccctccggtcctttgatgggagaaaattccagatgcagaacccgaaaggagatactttgtgcgtaatcaattacttttcgtatcacttcctcgtgaactttgggatccctgactaccccctttttgccaaccttttctcttcccgcctcaaactgaggcttgatcagacagacaatttcccccgcctctgccataagctcccggacgggcagcaaaactttagtgagggagataaaggatacatctatagaaacaaactgaggcggctcctgtatatgctccggaagcacatagcggatattggttttctccatacaggttacccgttcatcctgacgcagtttccaatccagctgaccatgccccacatccactgcatatacttttaccgctccgttctgaagcatacagtctgtaaatcctccggtggaggaacctacgtccatgcatacttttccggagagctccagaccaaagtgtgtcatagctttctccagcttcaggccccctctgctcacatatttcaggggattcccttttactgtgatctccactgtgtccggaaacatggttccggccttgtcctccctctgtccttctacaaatacattccctgacataattactgccttggctttttctctggaagcggcaagattccggtttaccagtaaaacatctaagcgctctttcatttggttttttcctccagtatggattggcatacagcctcaggatccagtcccacctcttggtgaagcagtcctacgttcccctgctctacaaaccgatccggcagtgcgcggatcatcaccttagccggaagcttccaggtgctcacacagtccagtacatgctccccaaacccgccgctcttcacattttcctccagagtgacgataaggctgtggtcccttgcggcttcacagataatttctgtatcaataggctttacaaatctggcattcaccagagacaccctgtgtcccttttctttcagcatctctctgaccatcactgctgttttcaccatactccctgctgccagcagcaggatctccgactctctgtaaatccattctccttttccatagtgaatctcttccctgtactcctcaaggccgtcataagcctcccctctggggtacctgatggcaatcggcccgtcataagccactgcatatttcagcatatccgacagctcccacttgtttttcggagccatcactgtcatgttgggaactaaagagagatatgacaaatcaaagcacccctgatgggtttccccgtcgcttcccaccaatcctgccctatcaatagcaaagaccacatgaaggttctgcatgcagacatcatgaatcacctggtcaaatgctctctgtaaaaaagaagagtagatggcaactaccggtgtcagacctcccagcgccagacccgcggcaaaggttactgcatgctgctctgcaattcccacatcaaagaagcggtctggaaacatattccggaatcgtttcagccccgtcccgtccggcatggccgcagtcactgccaccacatccgggttcctgtcgccaaactttctcattaccgtggaaaatatgtccgtgtagcttgctttactcccgctgcttgtaggtatcccgttggtgatatcaaagggagtggttccgtggaacctggcgggatggcgcatggccggttcatatccctttcctttttccgtaagaacatggacaatgactgctccctccacctttttggcttcattgagcacacgcatggtctggcggatgtcgtgaccgttcacaggtcccaggtaggtgatacccatatcttcaaaaaacattcccggaataaaaagctgtttgatgctgctttttgtcttgtgtatctttttcacaatagcgggtcccacactgggcatcttattgaggcttttagtcacactcattttcagtccggtataggcttcggcagtgcgtatgttccccaggtactgggaaatacctcctacattctcagagatggacatcttattgtcatttagcactataataaaattcgttttcagctcagaggcattgttcagagcttcataagccattcccccggtaagggccccgtcgccgatcacagacaccacacgataagtttcccctttgagatcccgccctgccacatatcccaggcctgcagaaatagaggtggagctgtgtcctgtgtcgaaagaatcacacgaactttcacaccttttcggaaaaccgctcatcccctgatattttcttagattctcaaaaccatcctttcgtccggtaaggattttgtgggtataagactgatgccctacatcccagataatcttatctgtaggaaggtccatgacattgtggagtgccatagtaagctctaccacacccagattggaggccagatgcccccctgtcttactcagagattcgatcagaaactgacggatctctgaagcaagctggggaaattcctccagcggtattttttttatatcgtttggctgatttatcttatctaaaatcattggtagcttcacctctacttttttctgccgctcagggaagaaatcagtgctataaggaattcaccttctcctgtcagtgacgtcagttcacatactgccgcctgtgtcagcttctctgcctctttttgggcatcttccagtccctgcagagttacccaggttgtcttgtgattcttctcatcgctgtgaactggttttcccagttccttctcatcccctgtgacatccagaatatcgtcctgtatctgaaacgccagcccgatgttccttccaattcgttccatggtctcaagctcacatttctctgcacctgcaagcactgcaccagtcataagcgcggcttcgatcaaggccgatgttttatttctatagatataatgcagcatctccctgtttataggtatgccgtcgttttccacatccacaccctggcctcccagcattccgtggataccagttttactacccaggatccccagagcctgtccgatcacagcaggggctgtatcactctgaaacgccagaaaagcggtttcataggcataattcagcagtgcatctccggcaaggatagccgcagcctctccgaatacaacatgggtagtcttttttcccctccgataatcgtcattatccagagcaggaaggtcatcgtgaatcagcgaatgggtatgaatcatctccagagcagccatgaaaggttctattgcctttcggtcacttccatggaataagaggtatgcctcctccatcattatgggcctgagccgctttcccggggctgtcatgctgtagtttaccgcctccgccattctcttcgaaaatccttcctctacgggaagatatctgcggatgatatgctccgcaagttctgtcttcttctgtaattcctctttaaaattcactgagttctccattttcatccatctgaagcattttcttttcaactttatctatcttactgttacagtattttaatagctccattccttcctggtagaccttaaaagaatcttccagtgaaatttctctgctctccagctgcgttacaatagcatccagagatttcattgcctcttctatggttctggtttcctttttatctgccatttattccatctcctctgtctgcagtttccgttttttccacagaggtatgaatcataccatctgcaacctgtattgtcagatgctccccaggttccacttgagtaacgcttgtgactgcatgatgattatcatcttccacataggaaaatccttgattcagcttattcagcggggataatcctttcatacgctcaatataaatattcagttcctggcgggaataaaggatgctgcgcttcatggcttccctcatcttatcctcaagatcaatcagtcgctggcgcttttcccgaatctggctggcagggcttaaaaagttaagctttgtcctgtactgttccagctgtcctttctctaaaagcacccggttctccatccctcttgtcaggcgtctggaatattcatacaaaagctccataagtccgcgcatatcatctaccgctaattctgccgccgcagatggcgtaggggccctgagatccgccacataatcggctatggtagtgtctgtctcatgtcccactgccgatataatgggtgtactgcagttgaaaatagctctggctacttcctcctcattaaaagcccaaagatcttcaattgagcctccgcctcgcccaacaataatagcatcaacgcccagagcatccagcttttcaattccttttacaatgctctctttggcaccgtctccctggacaagagccgggtagagaataatctgcagaaacgggtttcttctatatgatatattgcggatatcctgtacagcagcccctgtgggcgcagtgaccacccccagagtttttataaaccggggaatgggctgtttatattcctgggcaaacattcccatctcttccagttcttttttcagcgccagatatcgttcgtagagaagtccggcgccctccagggtaatctctttggcataaagctgatactttccgtctctctcgtatacgttgacacttccgcctactacaaccttatcaccgtttttcatggaaaacgcaagtcccttacggcttccggcgaacatgacacaggcgatcgttccgctttcatccttcagtgagaaataaatgtgacccgaggtgtggtatttacagttggatacttcaccctttacgtatatcttattcagaaaaaaatcctgggtgaacatgttcttaatataagtattgacctgggttacagaataaatactgctcattccttctccttagcgatatttcccaaaattccgttgataaaggccgcggattcgtcctggccaaatcgctttcctatctcaatggcctcattaatggctactttcaccggtacatccgggtcgtaattcatctcgtagacagccagacgcagaatcgtgaggtcaacctttcccatacgggaggttttccatccttttgccgcctcattgatcagactgtctatctcatccagtacatttcgcaccttattatatttctcttccatatacatctgatccttctggctgagttcccccagctgttcaaaatacagactgatctgctccggcatctcctccggtgtattgaattcacttacaaaaagcagtttaaatatattttcacgaagttctcttcttcccattccgtcctccacgtttaatttcacttctgcaaagagaaaaaggtgcctttttcagagacaccttaatgataccagccagaacgattcttctgtgaaccggatgtttctcaattgtaaaaggtctacttattattttccatctccacacttgcaatgcggacatttacgtcggatactgtcagtccggtcatattttcaatggccgtcttcactctctcctgaaccttcttgcttgtttccagaatgttatagccataatctatattcagcgccagatccacacataccacatcttccaggacatctaccttgacgcctttggacagattcttcatccccagctttcctaccagttcattcgtgatattcccggccatggaagcaactccctctacttctgtagcagccaggcctgcaataattgcaaccacctcatctgctatctgtacttctcccaaattgccgttatcatgtattttataggtatttcttttttctgccataatcaaaaacctcctaaggctattctcttgctggttattataacaaatttcacctgaaaataaaaggagtatggaaaaatttaatttattgctggctgagcctcaaaaactatgcagcacaccgccgcgtcaccagctgactttttttgttattgcagcgtccctacagaggcaaaaaaagcatcctttgttgccgcactatcatctgtgtaaaccagaatccaggtaataagtttgttgtcctgttttctggtacagtaatcctgatgcatatttacatccatataggtaacactggtagccatctgctgatagtcctggccaccaatggatactgtagcaatctcatcggagaatgtgtattccatctcatctgtggtaaaactctgcagctccgactttactgcctgaagatactggttcgcagtaatatttgccatggggctgtcctcagttaaaagtgtagcagtaaaatcctgggttgtatttctggcaataagctcatatacagaagtatcctccatctcagccacggctgcctgtccttcctcgttcatgttctcctcgccagtatccgccacttcctgtatttcctcttcagtgaggaataacagatcttccggcagagtaatcttcatattcagccaactgctttcatagacattgtctgtcactgttcccttcacataggccaccgccggttcttccgtcttctccgctggtttttctgtcttttctgccggttcttctgctttttccgccggttcttctgctttttccgtcggttcttctgactttgtgtcctccctggctgtctcctctgccctggattcctcctttttctcgtctgccgcctctgtgtctgtaccggctgttttttcttgtttgtcattcccgccgcagccagctgcaaaagtacacatggccaagattccaatccatagcaacactttcttcttcatatcttaattcctccatattaagttttctatctctatggtactaagaaaagggaaagctgtcaatgtgaagctcgtggtgtatagtaagcgaacggagaggtgcagacggaggtgtccccggaaaccagcccttcctcccgcccgaaccagccagcccgctgccccgggatttctctcaccgtctccctgccatctcacctcccggcatgaatcccccagagctaaaataagttacaaaaaaggcactgctccacataccgtgttacagtgccttcccctctaattcttaccaaactctgtcaaccgcagtccatcgtttctgtccagagtcattccaatgctccagctgttcacaaacagaagcagcggatttccttttaaatccataaccttcttcatatctgaagttccggttatcttcttgacatctatctcatctttgttctctatccagcggatatgttcatagggaagattttccagacggatgtctaccttatattcattttccagacggtattttaatacatcaaactgcaggacacctaccacccccacaatgatctcttccattcccgtgttcagctcctggaagatctgaatggcgccttcctgggcaatctggttgattcctttgatgaattgttttcttttcatggtatctaactggcgtactctggcaaaatgctccggagcaaaagtgggaattccctcgtaggcaaatttcttattgggcatacagatggtatccccgatagaaaatatgccgggatcaaatacgccgatgatgtctcccgcatatgcctcgtctacaatatgtcgatcctgggccatcatctgctggggttgagacaggcgcatcttcttttccccctgtacgtggtatacctccatccccgcatcaaacttgccggaacagatacgcataaacgcaattctgtccctgtgggctttgttcatattggcctgaatcttgaaaacaaaggctgaaaactcttccttcatcggatcgatgataccggcatccgcttttctgggaaggggagatgaggtcatctgcagaaaatgctttaaaaatgtctccacgccaaagtttgtcagcgccgacccgaaaaacacaggggaaagttcgcctttgctcaccttttccagatcaaactccgcactggcgccgtccagcagttcgatttcttccattaaaagttccttagccgcttcccccacggcctcgtcgaacttaggatcctctatggggatttcattttcaactccctcttttgtacctttcatagtatcggagaaggtcagcacgcttttgctgtttctgtcatagatacccttgaattcctttccggaaccaatgggccagttgatgggacaggtagcaatccccagctctttttcgatttcatccagcaaatcaaaggtatcgttggcatctctgtccatcttgttaataaatgtaaaaatagggatatgtctcatgacacagactttaaaaagctttctggtctgagcttcaacgcctttggaaccgtcaataaccatgactgcagaatctgcagccattaaggttcgatatgtgtcctccgagaaatcctgatgtcccggggtatccagtatgttaatgcaataaccgtcgtagttaaactgcagtacagaagacgtgacagagatacctctctctttttcaatctccatccagtcagacactgcatggcgggcagttgcttttccttttactgaccctgccagattgatcgcccctccgtagagaaggaacttttccgtaagggtggttttaccagcatccggatgagaaatgattgcaaatgtacgtctcttttttatttcatttgtataatcaggcacgatagcatcctcctgtgcgaactgtaattttcttatttttccaaagttaccgtgattttacacgctctgaatattttagtatacccgggaaacggtgtcaagggattttgaaattactcttccccctcagttccgtcatctgatgactgtgcctggctcatgggagtaattacgatattttcaggagccacgctggtttttctcttaacaatatcctcaatctgagccctcttagcatcatccagctcagagtccggtactatgacgtccgcagaatcactggtaagattcactaccacattttcaaatccctttgcttccagcagcagctcggccgcctcttcctgctctgccaaatctgtcatctgtaccatggatgccactgcttcctgtttctgctcgtcagaaatattggcattgttgataatttccagaagagtttctttgttggcggagcgaacctgttccctgctgatcttggcttgtgccacaaaggtggaagcacctgtaagtactgcctcgcccggggtctctacgttagcatctgtcgcactggcatctgctgtatcctgactgttttcttccagcagggctgtctcatcggtaagatctgtgtccagactgtcaatatcctgaagtacactgtccatatctgccgtggttttagaatcctcatcggatgaatttttaacatcttcggagcttgctttcttaagcgatttgcccatccccagatgactgtccgaataattgatgtatccggccactgctatcatgattgccagggcagtaataattacctgatttttcttaaaaattttcttcacttggattctcctctatttcattttcattactttaattttatgggcttccacctgaaataatgccataactgcctcccgaatattttgatttaccactgcattatcacctccctgggcaatcaccagcacacctttgattcggggcagtatctctgtggaaacatagggagtttgatttcccttggaatctttcgcatataccgtggcatccgaatctttttccaccactttttctcccgtatcttcaaatgtaagcacaacctgtacctttccgatcccctccacattggaaagagcctgttccagctctgtctccatctgcctccctgtaagttcccgggtgtctgatttttctgtatccggaagagacgtttcactggtgctgtccttttccttttcttttgtgggcaatgcaatgatcagcagcagtattcccaccagaagcactactaccagctgttccttttttaaattcttaggcagtccgtttattgtgtcatcccctcctcctgatacatttttacattgtatttctcttccagttcctgggcgtaatcctcccactgctgcagctgacgggattcctcctcctgaagatagtcataaaaagaagtctctatccgttcattgatattcaggaattgaagaataggggacagtaataacagcatcagcaaaatccccataaagtactgtacatatttccggtagctgttatccggcatgaagttgagcaccgcagacagaaagataaaaaaatacgccagattttccatccatttgtagatttgctgggtcatttcttgtccctcccctgttggaaaatatgcgccgtattccgtaattatgtctgaaaaaatgatgtggcaagtatagcaattgtgatcatgaacaacacctcaacggtaagaagtactcttaacagcagggcgcacccttccccgatagtactcaggcagcccaccatccgcttgtccgatatgggctgggtaagagctgccagaaatttatacagaatcgtggtaaagcccattttaaccagaggggagaggcccagaataaccaaaactataattgccactaccccaaggcaattgcgcaccagcacggaagtgcccagtactacctccgtcaccgcatccaccgcattcccaataccgggaatggcgctggcagtcttccccaaaaaggttctcttcagggaatccagtgcaggggtgaccatattctgtaccacctgaagccctaccaccactgccaggcaggttctcagggtccactcaatcaatgtcttcatcaattctgccatcttcgagagaaaatcttcactgtgaagataatttacaagctcaagaagtacgaacacattgatgccggggaggatcactgtgagcagcaggacctgcaccaggtagattagaatcagcaccatttcataaaacatcatggctgtccctgccccggtagaaactgtgatggccagaaaatacgctggcgccagagccttcataaaagtggtaagtccagtaagcgtatcatgtacctggctgcttagggtgccgaaggaatggatcagcactgccagaagaagcatataaatcatgtaaaagctaatctccccaatctggccattctcaaaaacgttggaaaaattagtaaacagcgctgcaagcaaaaccagcaaaagcacatggaccatcgtctccttctccacggagaaggaggtaagcagcacctgctgtatgacttccctgaaattctctttggtaaagatctgttctccgttcatcagccgttccatggccgttcccagatcgaagctgttctctccaagaagttctgtgatagcttcctgcacctgattcaggtccatatcctccatcatactgtcttcgatctctctgcccttgtcctccatggcttcctgcatctgaagctcctcctgggtcttttctgactccgaaggaggtactgcttcgatgatttcttcctcctgttccgacgcgcagacagactggatatttcccagaaccaatagaaaaagcacagcggcggccagtccgatgcgaaagggagcatggcctatcatgacagaaacccatgtatggtctccataacagccagaagaacaggcatactgatgaccataatgtataatttactaaatacctctatctgattgccgatagagccatacccggcatctttgcagattccggaagtaaactggccgatataagtaattcctatcattttcagcagcgtagtcagataggacgtgctgatcggaaggtattcctgaagctggcttacggaatcaaagagatattccagcttccctatggcatatgtaaaaatacacaggctgactcccaggctgatataaatagaatactccggttttacccccttcaggaaaatgcccagaagaattccagccatcccgagaatagctacttttatcatctccatgtgttccaccacctcttttcccgtttacagggagaataaatcttttatggtttgaaataaatcatagatatagggaagtacccagaataaaactaggattaatcccgcaaggctggttaagaatgcctgttcctctctctggctgtgcttcaataccatacataatacggataccaggattcccactgccgctattttaaataagagacttacttccaacttcccctccccctttgtacagatttatgccagtgcaatggccagaaacagtccgcccatcacgcccaggctctgatagattctctttttagccggaatggtagcctcgatttctttcaattccagttccagctcctgctggtacagttccagcgtgcttatctgcatggcaatatccaggtatcccagatactggccaatctgttttagactttctttatcttttggggtaaggctgctggatgacagatgttcatccacaccttctgcgaaaagctcctgaaaggtccggccatcgtattggcaggccttgcgggccacttctgtaagaaataaatggaaaggttccggaagcttctgaccgatctggtccagagcctccggcaatgtagatttgccataggagatttccccctttaaaaagagaagcagtctcctgatagttttcagctgctggtatctctttgtcagagacaggctcatcagatatccgatgccggaagatgcacctatcacgagacagattcctatcactttgatcatgatgtaccactcccctgatagaggcagctgcctctggcatcatagattgcatgtacagttcccgcctgtttttcttttttcagaatcacatacctgtcaaagatacgttcattcatcagacgttgcataagaggctttctcttaatatcctctatggtgcttccgtgaactgtggccagcagtctgcagccgcagtggattacggattcaatggcgtggatgtcctcataatcccccagctcgtctaccgccactactgagggtgacatggagcggatcagcatcatcatcccctcggcttttggacagcagtccaggatatccgtccgtatccccaggtcattctgggcaatgcccagataggatcctccgatctcggatcgctcatccaccacccccacagtgatcccgggaaatttatcccagccgtcagagatctggcggataatatcccggagcatagtagtctttccacatctgggcggagatataagaagtgtgtgataaatggtatcttcctgtatcagatagggcataatcgctgtggcgcagccttttatctgatgggacaggcgtaggtttacataagaaatatatttcacacttttcaccttgtccccctccatgacagcctttcccgcgattcccacacggtggcctccctgaatggtgataaatccctggcggacttcatcctcaaaggcatacagggaataactgcttacataccccatagtctctttcacttcctgggcactgaccagatatgcgttttctctcctatgtgtaaactgcccctcccgggtcaggaaatattctgtaccctggtaaactacaatcaaaggagcattgacccgaagacgtatttcatagacattgtccatatccatccgggctttggacagaatccccctgactgacagaggaaataattgaataatgggttctttcttaatgttcctcacctctttaaaacaatatatgaggacaatctgtttttagaaggagaaattcgtatttctgactttcatctctttcaggaaacgggacatctcctgtttttcgtcggaatagcacaggtgaagcctctttctggctctcgtcatacccacataaaaaagccgccgctcttcttcaatctcctcttccagcaccgctttgtgataaggcattaccccttcgtttacatccagtatgtaaacctcatcatactccagccctttgatgctgtgcagagtggaaatggtaactccctctttttgttccgactggtgttttgcctgctctttcagcttttcggagaattcttccatgtgggcaaaccatgcctcaaaagttcggtatcccttggtactgtcatgtatctctttcagggtttccagcaggtcttccgcttttatcctgcggtacactgcgtactctttcaggtaggcttcgtatcctatcccatttcggatatagttcaccgctccataaggagtcatgccttttattatcctgagatcctcctccagccggtcaatcctgtcgcacatccattccttatcctcataataccagcgcagcccttcaaaagaaaattcaccggagtccaccgaatcccgtgacagataacggttgggccggttcataatctgataaaagttttttctgcttctgtcacccagagcaatctggatatataccagcaggtccctggtaatccagtgctcatagagattgggcagcagatctctcatatgaaaaggaagctggtattccatgagcatttccaccagatatcttgcccccaggttggtccgaaacaagacggctatttcttccagaggctttttagcttcttttgccttaagtatccgatccctcacccagcggttttcctggatttctgtttcgaatcccctgacttcgatggggtcccccagctcatttatggtttttatctccttgggaaaacgctcctgattgtgatggattacattctggctggcttccagtattcttttggtggatcggtaattacagcccaaagttacgctctctgcatccggatattcttgcggaaactgaagcataatctgaggcttggctccccggaagccatagatggactggtcatcatcccccactatgaagagatggttttgaggcagcgccagaatctttattatctcatactgtagtttattaatatcctgaaattcatctaccaggatatacttgaacttattctgccaggctttccttatgtcctcccgctgcatgagcagttcatagcaccacaccagcatatcgtcaaaatccaggagtctggcactcctgcattttttctggtagcccctgtagatatcccggaatgtctcctcgggacaggccgcagaatagtaatgttccagggcaatcctccctgtctttactgtactgatctccccgataatatctgcaataagttctttttcatcctcgatttccagccggctgctgcgtatcagttctcttaaaatgccgtatttttgttcttccccgatgatattccgggcattcagcccgtaggcatggcggaggattccatagaacacaccgtgaaaggttccaaaggtgacctgtgtggaggcagtttgagataaacgcaaaaagcgctccttcatctctctggcagcggcttttgtaaacgtcactaccagaatagaggaaggagacacctgatattccccaatcaactggtgaacccggcgggttaagacagtagtcttcccggaaccgggtcccgccagacacagaaaggggcccttataatgcatgattgcagttttttgtgattcgttatattccattaagcacctaattttacaattgcagcctgaatcctgcggatagattcctctttgcccagcagttccagaatctctgtcgccccggcgggtgtcatctgttttccggagagggctgtgcggacaggccacagcacatagccatttttgtatcctttttcctttgcaaatccgcacaaaatctcatagagtgcgtcattgctgtaatcatcttgtgcctccagcacagggaatacttcttgcagcagactaagggaggattctggagttgtcttcatttttttatggcggtacatctctgtgtcatattccagaacatcttccacaaaatcgattaattccggaatttccgggaatacctctatccttgttttcaccatctcagctacttttttaagatctaccttccggctcagagttttctgaataaaaggaagtgctctctcataaaactggtcaaactccatggctttaatgtattccccgttcatccatttcaatttgacaatatcaaacacagccggtgatttgctcatatgatgatagtcaaagacctgcaccagttcctccagggaataaatctcccggttctcctccgggctccatcccagaagcgcaacgtaattgacaatagcctctgtcacaaacccctgatcgatgagatcctcataggatgagtgtccggaccgcttactcagctttttatgttcctcgttggtaatcagagggcagtgcacataggtggggatctcccatccgaaggcttcgtagattctgttgtattttggggcagaggagagatattcattgcctctaaccacatgagtgattcccatcaggtgatcatccactacatttgcgaaattataggtagggtatccatcagatttcatcagaatcagatcgtctagttcctcattgggcacagtgatttccccgtagatatcatcccggaaggttgtagtgccttcggagggcatattgaagcggatgacgtagggaactccagtcttcagcttttcttctatctcctctttcgtgagagagagacagtgcttgtcatacatggcgatctctttgcctgccacatttgtccgaagggattccaggcgttctttatcgcagaagcagtaataggcatccccctgcgcaatcagctgctctgcatattttttataaatccccagagcatttctctcactctggacataaggacccactcccccatctttatccggtccttcatcgtggagcaggcccgtctcttccagggtgtggtagattatctccagagcaccttccacaaagcgttcctgatccgtgtcttcgattctcagcataaagctgccgttctcgtgttttgcaatcagataggcatataaagccgtccttaaatttcctacgtgcattctccctgtaggacttggggcaaatcttgtttttactgtactcatcgtgattctcctggttcttttatatttaatgatagatcttcggcaggatctcgtccggactgccgtgataaacgaaatcagcattggcatcgctgaaatggggttccctgttaatcagaatcagcttttctcccataaagtacttcaaacaggtctgacacaggtaggaatgaagggtagaaccgataaccagaagggtatctgccttgcggatctcatctgccgctctggaaatcagataattatctaccatctcccccaccagccttacttgaggtctgaccggtacattacatttatggcacatggggatgtctctgcttttcagcatatactcaaagggaaaaacctgaccgcagtgggggcatttattgctgtatatattcccgtggaattcgatgacatttttacatcctgccctctttgccagagaaaatatctctctggtaacaattgcattcagtttgccgtcctcttccatgcgggccagcgtcttaagcccctcccccggcgttcccgggcttgccagtatttcgttgcgatagaaatcaaaaaactgcttggtgcgggtagtataaaacacagagctgaacatttcatccggggaataaccgtacttttcttcgattgcataggcactgctgtcgcttcggtaattcatacagccgcagtcctcacatattgtgattccctccagacatactacatttctactttcatccaaaacattccgaatactatccaaattcattctatcgcccctctttttattgctgttatctttttcctcaaaaaagggtacatggtatgaaccagtaccccattgcagacatattataccctaagtgctattttttttcaagcatcagttaagccagttcctggaaaatatccttcacatgttccagccttctacagcggtaagcattggctccgcagaacagcaatccattgtccacattcccctctaccgcctgaaccagggcgtccgtgatgcagtatggaatttcttttggtctgcaggtagtgatgcagtgataacaatatgggatcggctgtctttccgcctgcacccgttccataaacgcattttttatcgctcttcccggcatgcccacagggctctgtacgatacagatgtcttctttttctgcctcaagataagcctgcttgtatgcgggactggcatcgcactcataggtggtgacgaatcgggtgcccatctgtaccccgtccgcaccgagactgagcgcatgatccatatcctctcggtcaaagatgcctcctgctaccactacggggatctctttcccaaacttctcttcatattctttggtctgacggataatggatcggatgacagaatcatagtccagtgcttccatatccgagagctcttcctttgtgaatcccagatgtccccctgctttcggcccctctatgacaaccaggtccggggccctgtgatatttcctgtcccacattttgcagatcacatgcagtgatttcagggatgatacaataggcgctatctttgtcttagtattctccaccatccttgggagatcaatgggcaggccggcccctgagataatcaaatcaatacctgcagacaccgctgtttttacatagtcctgatagtgctgggtggctaccataatatttactccgataatccccccctgagccaattctcttgcttttgcaatttccttttttacagcccggaaatttgcatccataggatttttcttaaaatcttcctctctccacccaatctgtgctgtggatattacacccacgccgccggctgccgctacgcttcctgccaggcctcccaggctgacaccgacgcccattcctccctgaatcactggaatgcgggccgtaagttctcctatttttaagggttttctgtccatttacatcctcctaaacctttcatagcgcagtgcggctatctcctcgggattcttcttatccatccggcaaaggaaggatttcatctcttttttcagttcctctgcgatctctcccagattgtcaaggctggcggggactggttccgtgataatacgctcaatgatccgcagatggtaaaggtctgaggctgttatcttcataacctctgaggcctccggcgccatcttgctgtctttccataggatagaggcaaacccttccggtgacaaaatggaatacgtggcattttccatcatccagacttcatttgccacagccagggccagcgcccctccgcttcctccctccccgatcacaatactcagaacgggaacctttaaatcagacatctccataagatttctggctatcgcttccccctgtcccctttcttctgcttcgattccgcagaacgcgcccggtgtatctataaaattaataaccggacggttaaatttctctgcctgcttcatcagacgcagcgctttccggtatccctcgggggagggcataccgaagttgcagcggatattatcctttgttttttttcccttctgcactccaatgacagtaaccggctggccgtccagaagtcccagaccgcctacaatggctccgtcatcccgaaatgcccggtctccgtgaagctccaggaattcatcaaagactgcatgtatataatccagactggaaggccgcccggcgtctcttgcaatctgaacccgctcccaggctccaatctcttttcctccgtctctgtgctttccctgcttcttttccgaacttttttcctgtatttcggaaagaggagtccgactgaactgtgtataagacctgtttctcttgtgcagacgcaccagccccagaagggtacttttctgtttctctctggtcactataccgtctattatcccatgctctaccagaaattctgccctctgaaatccctccggcagtttctgtccaatggtctgctgtatcactctgggaccggcaaagccgatgagcgcaccgggttctgccagaataatgtctcccagcatagcaaagctggcggtaactccccctgtggtgggatctgtcagtacaggcaggtagagcagccctgccaggctgtgtcgtttgattgccgctgatgtcttcgccatctgcataagggacaccattccctcctgcattcttgcacctccggagcagcagtaaagaattacgggaagcttttcctctgttgcccgctcaatggaactggtgatcttttctcctaccacatatcccatgcttcccattaaaaatcttgcgtcacagacaccgatcaccacagattccccttcgatcttggctttcccgattcgtaccgcctcgtccagatgtgtcttttcctgcacctgcgcaatcttctcctcataatcaggataatcgagaggattcgacactggcatcccggcaaaccattcctcaaaagtacctttatccacaatcatcttaatcctggtctttgccttcatgcggaaatatccctggcattttgggcatacatagtgattcttcaccacatcttccttatatattacctctttgcatttgggacacttcatccagagtccttccggaacagagggggaagagggttcctccctggttcccgacagtgtaatataattgctttttttgaataattcttttaaacgggccattttttacactccttactcgtaatgctcctggataaaatgagtcgtcacattccctgttataaagtcctcctggttcagaatatcatactgaaaatccagattcgtgctgagtccttctatgataacctctcccagagtactgcgcatcttggcaatggcggactctctgtctttgtcatatacaatcactttcatgatcatagagtcgtaattcggaggaatggcataccccgtatatacggcagtgtcaattcgcaccccgttacccccgggcacgtgaaggttttctatggtacccggacagggcataaaatttctggtcggatcttctgcattgattctgcactctatagcatgcccccgcagagagatgtcctcctgcctgacgcttaaaggcagacctgcagcgatggaaatctgctcttttataagatcaacccctgagacaaattctgtcaccggatgctctacctggattctcgtattcatttccataaaaaagaattcacctgttctgtccaaaaggaattctatggtacctgcattctcatacccgactgctctggcagccaggacggcggtcctgcctatctcttctctctggctgggggttattgcacaggagggggactcctcaatcagcttctgatgccgcctctgaacggaacagtctctttctccaagctgcaccacatttccaaatttgtctgcgataatctgcacctctatatgtcttggccttcccacataccgctccagatacatagtatcgtctccaaaggcattgatagattctctctgggccgtattaaaattatccgggaactcttcctctgattctgcaatacgcattcccttgcctcctcctccggaggaggccttgatcataacaggatagccaatctgccttgcagcttccagggcagcttccagggtgtatacaggctctctggtccccggcaccaccggcacaccggcctccatcatagttctcctggcctcagacttattgcccattttattaatcagggttgcagagggtccgataaatgctacattgcatttttcacacatttctacaaacttactgttctccgataagaagccaaatcccggatgaatagcttctgccttggtagcaatggtagcgctcaggattctttccatgttcagataactttctgaggcctgggccggaccaatgcatacggcctcatctgcaagctgtgtatgcagggcatccctgtcagcctctgaatagaccgccaccgtttgtattcccaattctctgcaggctctgataatccttacggcaatctctccccggttggcaattaatattttctgaaacatacaaactcctaactgattgcaaaggtaagctctgcaaccgctgtaatcttccctttttggttggtggcctttgcagcccctacgccgatgggacctttttgctttatgatctcaatctccagggtcaatacatcccccggcagcactttttctttgaattttgccgatttaatagaagcaaaaaatgcagttttgcccttgaactctggcttgcttaaaatagccaccgccccaagctgggccagcgcttcaatctccaggacaccgggcatcaccggctgtcccggaaaatgtccggcaaagtaaggctcattaaagctgacacattttgttccttttgccctcactccaggctccagctcctgtacggtgtctatcagtaaaaatggctgtctgtgaggtataatctccataatctccttggtccccagttccattggcatctccccctatctaatcacgaacagcggctgtccgtattctactacctgttcattttctgctaaaacctgctctaccacgccgtcatattctgattcaatttcattcatcagcttcatggcttctacaattccaagcacctgtcccttttttaccgtatctcccacatggacaaaaggacctgcatccggagaagccgcgttataaaaggtacctaccagaggggcttttacaactttgcctgaaagaatctcctgcccctcttcctctatctttacagaaacgtcagacacattctgtgccgccggcacagtgtccagaacagccggcacagcagcaaatttcggctgcttattcgttttcatggatattttcaaatccttatcttccatttgaaactgtgtcagtgaggaatcactgacggtacggattaatgtaataatcttatcaaattccattctcataccctcctattctgtgtactttttcaccagcagactggcgttgtgtccgccaaatcccagggaattggtaagggcatatggcacatccatctcaattccatgccctgtcacataatcaaggtcacattcttcatccggtacctggtatcccacggtttcatggacatagctgtcctgtatggattttacacaggtgataaattccactgctccggcggcccccagcaggtgtccaatcatggatttggtagaattcacctttagatttttagcgtgctcctgaaacagtttcttaattgcccttgtctcaaacaagtcattgtgatgggtgctcgtgccgtgggcgttaatatacggcacatcctcaggagcgattcctgcctcccggatggcatgttccatggctctggccgcgccttctccgtcttctgcaggagatgtgatgtggtaggcgtcactggtagtaccatatccggccacttctgccagtattccagcgcctctggcctttgcatgctccagttcctccaggactacgacacctgccccttcccccataacgaaaccatctctttctttgtcaaaggggatagaacagcgtcccggatctgtggatgtggacagcgccgtcagcgcagcgaatccgccgataccgatgggagtcaccgatgcctctgtgcctccggctaccataatatcagcctctcccagctggatcgtccggtatgcttctccgatgctgttggttcctgttgcacaggcggttaccacattgatgcttttccccttcagcccaaactgaatggagacatttcctgctgccatattggagatcatcaggggaaccagaagtggattcacacggttcggtcctttttccaggagctttgtgtgttcccgttccatagcctggagacttccaatccccgatcccacagcacagccaacccggtagggatcttcctcctcaagacaatagcctgactgttcaatggcttcctttgccgccgccaccgcatactggcagaacagttccattctctttgcagccttaaaatccatgtattccttacccacaaagcctttcacttctgctgccagatgggctttgtattcagatgcgtcaaactttgttatctctccaaatccagtcttcccggccttcactcctgtccaaaactcttctacattcagccccagaggggtaatggctcccattcctgtcactactactctcttcattttgtccctcctacatgctcatgccgccatcaacactgatgacctggccggtaatataatctgcattctcagaagccagaaacgccaccatccgagcaacatcctcaggactcccaaagcgccccagaggaatctggctttccgcgtatttcttcacttcctcacttaagacttctgtcatctctgtggcaataaagccgggagctaccgcgttcactgtaatacctctgcttgccagttctctggccatggattttgtgagtccgatcaccccagccttagatgcggaataattggcctgacccgcattgcccataactcccgagactgaagaaatattgataatttttcccccgcgctgcttcagcatctggcgcgacgtatgtcgtatggtattaaaagttcctttcagattcgttgcgatgacctcgtcaaattcttcttctttcatcttcattgccagattgtctctggtgattcctgcattgttcaccaatatatccagggaaccataagcttttacgatccctgtgatcatctcctgacaggctgcatagtcagctacgctgcactgccatacagccccgtcccctcctgcttcctttatttctctgactacctcttctgcccgttcccgggatccgttataatttactaccacaaatatgccttcttttgcaagcgtgagggctatggctcttccgatgcccctggacgctcctgtcactaaagctatgtttcctttcatatccaattcctttctcacaggcctaagccaggtgttccattaccttctgaaaatcttctgtattctgtatattcattactgtcacatccccgctgatttttctgataaacccgctgagagtttttccgggcccgatctccacaaaggtatccacacccccggctatcatcttctctacgctttgctgccaccttacagaggaggaaacctgccggacaagcagatcctttacacagccgctgtcctctacgtattctgctgtaacattcgttacatagggagtttctatgggatatatctctgccttttttaattcctcccggagtctttcgcctgcaccggccagcagcttggaatggaaggggccggataccttgagagggacaatccttctggcgcccgcctcttttagttttactcccgcagtctccacagctgccgcctctccagttattacaatctgtcccgggcaattataattagctacagaaaccgtacccgtaacagcatcacagatcttggcaatcgcatctccgtccagccccatgacagctgccatggcccctccaaaaggaactgcctcctgcataaagattcccctctttctcacaagggcgaatgcatcctctaacgtcagggctttggatgccaccagggctccgtactctcccagactcagcccggcgttcacacaagaggagagtccggtttcctccactgcttttagaatggctgcggataccgtcagcatagcaatctgcgtgtattccgtaatattcaaacggctattttccgtaaaacaaagttccggaagatctagtcccgttacctgtgcggagcagtcgaacaccgccttacagacgggcatcttttcatagaaatcctgacccatccctgcatactgggctccctgtcccggaaaaacaaatgcaattttattcatctctgagaactcctttgtgcgtaaaatattttgtatatcaaactatatgtttataaaaaaatccggcttgccggattcacatgtattccttatagagaaaggtgtgggctttatgcctccacacctttatttttcagatactccataacagcgcccacagttgtcagctcctgcagctcctcagcaggaatctctacggagtattcatcttcaagagccatcactaattcaaataaatccaaagaatctgctccaagatcatccttgaaggatgtctccggagtaatggtaccttcttcgcaatttaactgttcagcaatgatttctctcattttttctaacatattcataatctcctttaattaaactttaacatacagggataaccgtatgccacctcgaggaatcttcctccaaccgaatactttgacattcaaagtatatctgctattgccctttttgtcaactataattttctattcttcctgtttctgaaactttatctgcctggatacactgagggcaattccgatctccgtcatcaggaatataatggatgttcccccgtaactgataaagggcagggtaattcccgtggtaggtatcagattaattactacgcagatgttcaggataacctggagggagatatggccgaagataccgcatacaagcaaagagccgtacaaatccggtgcattctgagcgataaacatcagccggtacagcagatatgcaaacaggatcagaactacagcgcctccaaataccccaagctcctcacagataatggaaaatatcatatcattctgggcttccggcacagctcccagtttctgcgcgctgtttcccaggccttttccaaaaaagccgccggatcctatagcataaagcgcctgcatgatctgatatcctccgtcgctgatatacttttccggctccagccatacaagtactcttcggatacgaaagctctcactggtctccagagtcttggcaaggattgccactccccctgctatcagagccgctccgccagcacctgctataataaagggttttgttctgggatgggcaataaatatcataatgaccgtgattcccacaatgatgatacctgtactcaggttatctgtgaaaatgtaagcaagcgctcccaaaaaaccgcccgcacacagcagcatcacgcatgcctgccatgttttaatctgcttccccatcttgataatcaaaagggggatgaacgtaatcaccgcaatctttgccacctccgaaggctgaaactgaatgggtccaatcttcagccatcttctggccccattcagaacaataccgagaggggattttaccaggaccataagcacaactgcggccagataaatataggaggccagcggcatcaaaaggtggtaatccagccgggatatcaccagcgcaaacaggatactgaccacactgatcagtgcctgcttgccaaaataagccatgtcatctccgaatttcagttccgccacataggcgctggtgctgtataatatcacaaggccaaagcaggtaagcaggagcaccacagccaccagattaaaatcataatagtcaatctgcgctcttaaccgctctttcgccctctgcctggctctcgcacgtttttctctgctttttactattgccttcacttgtgcaaacatgaagttcctccgttattatttttccgttgtctcaagctctatatgcgaagagcatatttcatcagttcccaaaatcctgttcttgtgtcactctcctggtccagtactttccgcaccagaaccgggttatcggtaataatattatctaccccgcagtttatcattctcttgacatctcccctgtagttcactgtccaggcgtgtacttccttaccgcaggcatgagcctctgcaacaaagtcctcatccacataggtgtgtttcacactaaaaaaatcagcgtatttaacattggcaatactgccgtaagtcatggtcataatataaccggttctaatatcagggttcgcctttttgacctgtttcagaaaatcatagttcatggaagtaatcacacagtggtcggcaaaatcgttcttctctatctccctgactacccgctttgcgattcctttattctcaccattatacttaatctcaatatttaagtccagctttcctttggaaaaatttatagcgtcctccagtgtggggattttttcccctctgaattttttatgaaaactgattcctgcatccagtttattcacctgggcataggttacgttccatatattttccttcaggccagccgttcgtttcagagaattgtcgtggagaagtacaagcacacggtcctttgtctcctgcacatcaatctcagcataatcacagagggtatcgttcgcataggccagagcgctgaccgtattctcaggagccatcaatgcccctccacggtgggctgtaatccccacagaattccatatattctccgcagcctggcggctctgtatcattacataaacaccgtaaaagccctctgataccagcagaatggcagtcaataccccggcaatttttcttctcagcctcagtccctttgctgtatgcctcggaaacaaaatccgcttcttccagttactgactgaatcgggataggctttctcataaatcacaaagacaaacgctagggtgagaaccagttctaccgcacctgctgccagtcccagaccgatatccagccacctgctgtaggtcaggacagcacctgccgccatagctgtagatttggtcagcatagaatacaggaccacaaatataactgcgatgagatataccgtcccaacaatcagagccacaagtacattaatcaccgcaatcccaacaaccgtctttccggtattcttccgaaatattttcagggcttcgggcactcgttttcctattttccccccagtcataaagcagctgggaagaatatagatgaaaagcagggagaaagcaagcagtaatccgcatatggcaaacagcacccagtgccatggcacagccttatagagctgctgcgccgaaaactgcagtaatttaatataagagacctctctcacaatgagatgcagctccataatcggagccggcagtgctgctgcaagaatccatgccgtcttatttttccggatcatgataaaggtcctgtagagccctccgaataaaagatcccccggagtcaccttctgcctgttggccgaggcttcaaaacaagtgatcagtgcccctgcttctatcagaagaaaaaacaggatttggagaaacacggccagcaccaaagccacggaaagcggatggagaataaagcttgtataattctcagccgtgagatagctgaacccctgctttttcagagaaaagtctatggctgtctgcacgcagtaaccactgagaagaaatgttgcagtccggtacataatctcaaataccaaaaggcttcccatattcttctttacaatgtaatacagacggccaaataattttctcatatacccttatacttctgcctttctattctgaattcagctcaaatctctgcaagacataagaaacacctctttttgatccagccagggaatagcggccgctgttgccataactttcttccccagcacttcgctgtataaaaccgcactgacctttttgcctcccttcttcagccggaggcttggacaatactcacagggtgtgtctctgtgatagaaggctttatagcatatgctgccctccgcagcctcactcacagcttccctggtagccagattcgcatattgaatcttataggtattgcgttccacagcatatatccattcttcctgattgtctaagatcatatgcaggctgtccagcagctgctctttcctatcctgggctcttttcttcaaaagaaaagtccctaccatttccgcaatcaaagagagggttctaatctgggtttggggccagaaccgattttcccggcactcatcaaaccctacatatcctctgttttttcctccgtcccgaatcagacagtgaagcatagatttaattccctgtgcatccaggatgtcaaactgttcttttgtcatctcccgaatgttcctgcagtaatatatgccatactcatcaaaattgtcatagtaatctcccagcactgcgtatggcaccctctgcagaaactctttctgcggtgcaattccttctgagcaccattcaaaggtattggtacaatatgtaccgtcttctgaatcctcaaatatataaactctgcttacatccatctgtctgcccacaatttcaagaatcagcggaatagattcttcaagattgtcaccattataaaggatgtgaaacacatattctgccaactggtagggcagcacacccagatttttgtcggattctatctccttttccccagagggtgcaaacgacttcacctctgctgcagtcagcgactgaggaagcatacccttttcatatacagcatatctattcttcccctttttcttagcataatacagtgccacatctgcatttttgaagatttcctgaaaggttctgccatctttgggtatcctggcaatgccgatgctgcaggagatctgctgcttatccatctccttattcatcagtttcccaaaggcatccagtatagctttggccttcttttctgcatcctctgtcttttctatcccccacaggagtactgcgaattcatcgcctcccactcttcccacaatatcgttgctccgcaccagatttttcaggcttctgccggcctctgccagcattacatccccgttcaggtgtccgaatacatcgttgatctgcttgaaattatctatatcaatgataaagaatgcaccctgctctccttcctgcatatgcaaaagcttttcttctgtcagattctgcaccgttatcttattgtacagacctgtaagagcatccctctgcgcctgttctctaagcttcagggactcctttttcatatgatcgatatccgtcagtatgcagtagaagacctggctgccgtcttctctgtttactatctgccctttatcgtgaatataaagaagctttccgtctctgcagattatcctgtactcaatctctttttgatcactatatgccagctgcttttccaccttttcccaggttttttccagatccccgggatatatcatacgggagaattcattttgaaaccgttcggcaatctcctttcttgtatatcccgtcatcttcagaaaaccgtcactgataaaaagcaactttaattccctggtatattcacagcacataactcccccaggaatattctgaatcagcgcattcatgtcctttgtcttttcttttaattccaaagacttctgttctaccaactcgtgcagattcatgagtttttcccctttccaaataccagtaaggcaacctgaggaacagacagcggtttatataatacaaccgctgcactatttcataccataccccggcaaaaagctctgcctgtaaccgggtcccacctactgctattgtactcatatgtaatttacactcattctacccttttcagccggaaaaggcaatcgttccgcggaacattttccatgaaaagacataggatagtactgtaataacttaaattttgtaaaggatatgcttatggacaaatgcagaatgaataattatccagggtaccgtccctattatccccctccatgcccgtccaggactccggaaccgcgtaccgcatccccctgtaaaccggctatggactgtgattactctgttgtcaactctctccccctggctatgggatatgtaccctgtcagaagttccgctctacctttgagctctgcaaagctctccaggtaggaaccattttcccggaactttgcaagccatttacaggaaagcaggtgatgcatcgatgaatggaaataacaaaccatgtaaagaacaattacttcagctgattaacgaagtcagctttgctgtagacgatattctcctatatctggatacccatccggatgatgagaaagcccttgccttctatcaggaaaaagttgcaatccgcaaggaagccctgaaggaatacgctgcctattacggacctctgaccatcgatactgcagatgacgcctgcagtacctcctgggaatgggttatgcagccctggccctgggaagtgaaaggaggttgtaaataatttatgtggaattatgaaaaaagattacagtatccgatcaatatcacaaaaacaaacgctaaaatagcacaggttatcttaagccagtacggcggccctgacggcgagatgggcgcctccatgcgctatctttcacagcggtttaccatgccgaacagaaaggctatgggtgtactgaacgatataggcatatcgttgccggtattgcccctctcctgggcttacgcctaatcttaagatactaattgtgaactacataaaaatacggtataataccaaaagtatctttatgaaatgtgaggtgatttttttgctgcacatagcagtatgcgacgacgagaaaagttttattgaaagtttggagcatttattacaaacatacgctgctgaaacaggtctggaaataaaggttactcccttttatgacggcagcgagttaattgagaaatatgatactgcctttgacttaattttcctagatattcagatgcatcaaatgaacggcttaaaagctgcggagtggatccggcagatggacgaagaggtaagcataatcttccttaccacattaacccaatatagtctggaggggtataaatatcaggccaccaactatattatcaaaccaataaaatatgcccggctgaaagcggaaatggataggtggagaaagcgccgtccccagggaaactccccatatctggcagtttccactccttccggtaagtacaggatttttctaaaaactctgcactacgtagagacttttaaccgcagtctgcttcttcataccgaacaggagaatattatctgcagtaaaagcatgaaggagatggaacaggccctgagcggcaaaggatttgcccgctgtcacacaagctacatagtcaatctcttttttgtaaaaggggttaaaaaacttgagatcgaactgattaccggcgagattatccctatcagccagcctaagcgcaaagaatttatggaacagctggcagattactggggggatttcttatgataataacattccttgatgcacttgcctatgtgtttgcggctgcctatgcctttgtatttttctggattctcaaaacttttttgtgtctccgtaaaaaccgcctggtgaaagctgctgcctttctggcttttatccccctggctgactgtgtcatttattccaatgatttggtcggtattctaggtactatgatcggttttatactctatcttcttctcttttaccgggggagcctcatggtaaaaatctccgtagtactggtattttacccggctttaatcggtattaattatctgacccaggatatcggggcacgcctgtttcacagagctgcttccatagagttcggacaggatatcgtctggacccacgacttactattgaccagtacagccttgcacacagcttcctttttgttccgtctcctgttctgggtaggcgcatggctgattctgcgaaggtttctttctcagattacgtcaaacctgaccacccggatatggctgatcgttgatatgctgtcactggcttcttttgtagctatttttacaattatatatttcatgccggaaaacgctgtcatcatctatcccatctgcggcgcctctattttttcgagcttcggctgcgtctatctcgcctcttatatctgtaattcggttcagcttgcctaccgggcccaggaattagagatgcagcacagctattacagggacaggctgaaggaggaagaacgggtccgtagtatttatcatgatctaaaaaaccatctgctaatcctggaggcgcagtctgacagcagcggggaaacccagaagaccattcagactctgaaagcacaaattgaaggctatgagacttatcagcacaccggaaatgattttctggatattattctcagggacaaattcaggatttcccgggaaaaaaagattgattttagtgcggtagtacactttgaggacggttctttcctggagcctctggacatcagtaccatctttggcaatgctctggacaatgccattgaggccagcgaaaaacttccggaaggccagagactcataacggttaaagcggcccgtgtccgggatatgctggctgccaccgtagaaaataacactgcttctaatctgcctctgtcaggaaaaaccacaaaaaaggatgttctgttacatggatttggattaccaaatattcaaaaaaccgtagaaaaatacgggggacagtgccggacgcagacagacggaagaacttttatgctgaaaatactgattcctctgccggattcataacaatttcccatagggtcgctgcattaagtcagcgtcccttctttttctcaacgaaaataatccagttctcaggacccctcccatattagtttttacaaacagaatattagttttcgcattttctattgtacctttttatctgcggattataataaactcaagttcccgagaggacataaaaattgcagaaatgaggtatctagatatgagtattttgtgtaccacccacttaaccaaacaatatggcagtgagccaaatatagtaaaagccctggacaatgtaactctcacgatcgaacagggagaatttgtcgctgtcatcggcacatccgggagcggcaaatctaccctgctgaatatgctgggaggcctggaccgcccctcatccgggagtataaaagttgataagtttgagcttggaaagctttctgatgaagatctgacagtattccgccgccagaggattgggtttatcttccagaattataatttagtaccggttctgaatgtatatgagaatattgttatgcccattcagctggacggcaagaagcccgacgaaacttttgttatggaaatcgtatcactcttgggcctggaaaaaaaattggacaatatgcccaatcatctatccggaggacagcagcagcgtgtggctatcgcaagagccctggcaagcaaaccggctattatactggcagatgaacctactggcaatctggacagcaagacaagcgacgaggtaatacagctgctgaagctaaccggcagccaataccggcaaaccatcgtaatgattactcacaacccggaaattgcccggcaggctgaccgcaccatccgcattgaagacggaaaaatcacagagtaaaggcggtgaaatcatgaaaaaccaaacatctatcctacacacgttgaccggccgcagctttcgggccaacagagcgagaaatatcgtagcagttattgccattgttctgaccacacttatgtttactactctgtttgtactggcccagagtatgcagaaaaatatgatagagatgacgttccggcagaccggatatgacgctcaggcctctattaaaaatataacagaagagcagaccgaacggattgccgcccatccggatgttgatgagcttggccaaagcattgtgcttggacttgcggaaaataaatcccttgcaggaaaacaagtagaaatccgctggggaaatgacagttatgcctctcattcattcgctctgcccaccacaggctctatgccccaggcagccggcgaaattgcacttgacaccctgactctggatcgtctgggaattccccatgagattggggcggatgtcacactggaatggaggaaggacctctctgaagaagataagatcaattcaagctttacactctgcggttactgggaggggaacgaatctatctatgccagtatggcctgggtcagccgcagtttcgccgatgagatgaccgccggtcgaattcccactaaagatcaggtcctgggacttcatatggctcaggtttctcttcccagcgacagtaatattgaagcctctatggataagattctggcggacacacagctttcccagttagaatacggcgtaaatctggcatattccccggaaatgaatgcttcagcagcccaggaaagtattcctatgtatctcggaatgattctggtatttgtggcaggctatctgatcatctacaatatcttccagatctccgttgccgcagacattcaattttatggaaaattaaagacactgggcactaccacaaaacaaattcggcgtatcctgtatgggcaggctaaccgcctgtgtctgctaggaattcctgctggattagtcttaggttttctgctgggtatggttctggtacctgtactgatggggacctttggcgactcagcagtaacatccacccatccctttatctttcttggttccgctctgttcgcctgggcaacagttctgatatcctgcctgcgccccgcaaggcttgcgggcaaagtttctcccatggaagcgctccgatatagtgactcgggcacaaagagcagaaagaagacaaagaagggaaaaaagggggcctcccttacggcaatggcatgggctaaccttggccgtaataaaaagcgtacggttactgtaatctgttcccttacacttggcctggtactcctgagctgtttttacgccaaaaacgcttcctttgatatggaaaaatatgtatcgggacagacaattgcagactttgaactggaagatgcctcccatgaggatgctatcaatggttacaatccccagggaaatactctgaacgatgatttggtttccgacgtggagacaatggaagggctggaatctctgggacatatgtattctcaccaggtatcatgggaaatggatacccagacaataaaaaacctgaatgccttttatacacaggatacgctggacgactggtccacctacgatcccaccggtcccaaggcattgaaggcagcaatcgcggataagcgtgcagatactgtcatctatggactagatggcattccccttgatacaattacccagtcacaatatatttattccggtacttacagtactgaagcttttgccactggcgactatgtgcttgcagtcggtcctgccatcggtgaaaatgaaaaagaaaaatacaaggtctatccgactccctctgttggggacagcattataatagaaggaaaagattacacggtaatgggaattgtttatccactgaattccgtggacagcggggccatggaaaacggaggcggaagcggcttcagtctgagctttattctcccttcggaaacattttgcagtcagtggccggataacacactgcgcaaactcttttttaatatagatgatccgcacctcaatgacgcccagaaaatgctggacgaatacacacaaaatatagattcaagcctgcctgtaacttcccggcagaccatgattgaacagtatcaggccgaaacccgtgcttccgctgttatgggaaatgccataagcttagtgatcgcgctggtaggtattctgaactttataaacagtatggttactgctattgtttccagaaaaaaagagtttgccatgattcaatctgtgggtatgacaaagcgccagctctgcagaatgctgatttatgaaggactgtactatgcagttatcacacttggggtttcttttctgatcagttccgctgcagtagggatcggtgtgcgggccatgatagagggagggtacagtacttttcattttacactgctgcctttggggatatgttctcctgttctgctgctattcgctgttttggttccacttctgtgttttaaaaatctggaaaaacagagcattgtagagcggctgagagcaatcgattgagcaaacttacccatcttctcccgcggcctccagaagcctgcgaaaagcctgttcaaactgacggtcatcttcccctgtcctctttttcggtcccctgaggtgatttttggatggggaccgccgtgctttttttgccagatgcctctccattaaaagctggtcaatatttttatctgtatatagcattccggagggatgaatcccgtaagccccttttcccaatgccattgcagccactccgtaatcctgtgtcaccactatatctccctctcgacacagtgtaatcagggcaaaatccactgcgtctgctccggttccaatcacctttatgctgctgtaatctgactgcagcatatgattggtatcgcagagcagggtgacaggtaccttacaatccatggcagctttctcagcaatttttattaccggacatgcatccgcatctataagaatttgcatggcacgcctctcaatacctttctctgtgaatcttggcagtctctaattccgcaagggtatgtggttttggatgttctgcaggaatccccagagagaggattgcttctaatttaaagttctccggatagtgaagaagctgtctcagatattcctcagcggtacccttttcagcctcccggagacggccctgtatccagcagcttcctatccccaggctgtccgccataaggtgcatattggacatagcgatggaacagtcctctgtccatacatccgtctttcctgcatctgcgattacaacaacggcacaatctgcaccttccagcatctttgccgcccccaccctgcagccagacattgctttcagactctctttatccctcactacaataaactcccaggggcggattctccggccggatgcagacagaaggcccgcctgcagaatcatctccagcttttcctcaggtacttcctcctgtgtgtatttccttatacttctgcgttttctcataatttccagtagttccatctttctctcctttcttttatttatggtacccggttgtgagcaccgcggcaactgcattgccaagttcgtcgtagacattcatctggtaacagcaggtggtgcgtccgtctttaatacagacagcttctgcaatcagcttctccccttttggcgcccccagatatgtaatgctggagttcagagatacggtgcccatcacctgccagttggaagccactgcaaatgcgaaatctgccagggtaaaggatacccctcccatagctgctcccatggcatttctgtgtctgcgctccaaaaccagactgcattttgcgtagtggtcatcaatctcttctataaccgcgccattttctgttgcaaaccggtctccctcaaataattttctgactttctctaatgtctgtctgtccatgttttcctccgagtattctcctgccctgttcagcgggagcattgtatctgatattcgtatgttgtttttaattttagcacaattttctcctttttgccacgtaaaaggaaccggcagcctctggattgctcagagtactgccggttttttctctttcttgagtaaatttatatccaataattttgtagtatagttttcccctcttccactggtcctgattttcatgtggaaacctacgggcaggcattttagccagacagccagcgtattatggtcatatacaattattttttcaagaatctctctgtatatgctctccctggcggatggaatattcagcacctcatccagtaactctctgtaatgacagacctcataggtattaacggatactatatctgtttttttctctgcagtctgtatctgacggtttacagcctcgattttttcctcataccacccaatctgctttctcaagtcttctctgctcagcattccctccaaaaccaaatcaatagcctttcgttttttttcttccagtgcctctctttttctcttcagtcgttctatttccgccctttccccctccgcaggttccaacttctgcagattgaaaagcacttcttccttcagggaattccatgataccggcacccgggcagccgcaaagcccatacagcttaacagggcattctcactgacagtctgattatcgcatccggatcttctccccaaatcgtctgttttttctcttccataccccgcattggcactgcacctccacgctttgtataagcttccgtctttcctcgtttttgtacggctgacaaagctgcggccgcatctgccgcatattagttttccgctgcaccagtaacggttgctgtatttcttaagttccccagtcttaagcttcctcaccctcagtgcttcctgggtgcggttccaaagctccctgtggataatcggagcatggtgatcggttatatatatcttttcttcttctcctctgttgtattttttcttatgtgtaagataatccggcgtaattgtttttttctgacagaggtcacctacgtatttttcatttttcaggatacgcagtatagaggcattgctccacagaaggccgctttttgagggaaatccctcctcaaaaagctctcttgctatgacataggttcctttttcctcgttcgtatatttatggaaaatagccctcacaatccgggcctcctcctcattaatatacagcttcccatccttcactccatatcccagaagctctcttccaaatacaacgccctgttccatcctccgtttttgtccccactttactctctctgaggttttgcggctctcctcctgagcaatgctggccataatggtaaggcgcagttctccatcctgttctctggtatcaatgttgtctatggtaaagataactccaatcttatattcctttaattttcttgtataatacagggtatctacagtgtttcttgcgaatctgctgacctctttggtcagaatcaggtccatattcccagccatggcatcttgtatcatacgtttaaagccttccctctttgctgtctgtgtgccgctaatgccttcgtcataataaatgtctacaagctcccagtccgtatggctcctgatatactctgtgaaatacctgcgctgactcaccagagaattggcctgatcctcatgctccgtagaaactctgcagtaagcagcaaccctcagctctttcacggtgcactgctctcttttattagctggtcaagctgagactccgtcagtacattctttttatagagttctttgtataccccaattttaattagtttttccaattctttgcgctgaatctctgacacctcaacgcattgctctttgtagctgttcttcgattgcctggacctgccggaatctggcatttatctcactcctaaagctgcattactaaaatatatgcaatacagctaggccatagtccggggcggctgcctcctgtagtttgactgtcttaaagtcattacccattaaaaggggcaatataggctgcgatataggtacagaagaactggcacacctggagatggtatccaccatcgttcatcagctcaccaaagacctgactccggaagaaattatgcagcagggcttccagaactactacgtagaccataccgtaggcatctggcctcaggctgcaggagggatacctttcaacgcatgcgaattccaatcaaagggggatcccatcacagacttattcgaagacatggcagcagaacagaaagccagaactacctatgacaatattctgcgtctggttaaggatcctgaggttgcagatcctatccgtttcctgagagccagagaagtggttcacttccagcgattcggggaggctctgaggactattcaggaagaactggactgcaaaaacttctacgcctttaatcccagctttgattttccaaaaaaatctggctgtgactgcaaataagcagaatgcggccctccgggcgcaaaaagccaccgggattattttcttcccggtggcttttagatcatttccttatgtttacatacttagcagagagcatccatgcctccgtccagacggattcctgatcccataatatgggaggataaatcagaggcaagatagagcgccagatttgccacttcctccggcctgcagtaccttttatccagataatcctttccgaatatttcttcacattctttatgtgtctttgtatctccgaaggtgtttttttcaatcctgttaatcataggtgtatcaactcctccagggcagatataattacagtgcactccgtgaggacccagttccagagcaactgactttgtcagcccggcaaccgcatgcttggatgagcaataggcgctcattccggcagctgtggtataacttccattagacgcaatggtaacaattgccccgcttccctgttttacaagatagggagctgcgaatttcatggcatacataacaccgaatacattgacattgtagactgccatataggactcaaaggtgcagtccgcgatctcctcgtatttcccctcatatccggagttgggcacgaggacatctatcctcccaaactgctgataagccccgtcgatccaagccttcacctcttctggtttcgtgacgtcagccacaaatgttttcagattttccggagcaatgtccagattcttgacaaatgcatccaattttgcctgacttgtagatgagactgccagtctgcagccctctcccgcaaacgctctgcagagcgcctgccctatcccgccggtacagccattgatggcaacgactttattttgcagttttaaatccataaatacctcctctttctattctcaaagctatttttttaagggtgacaattttaatgcggccagcagcagtatcattccaatgccggttgtcacggcaaatacaatccatgcaaggctcatacctcccttggaagccaaaagcactgccattaccggtgacgccagagcctggccaatatatacggcgaccatcaaggttgcggagatctgcgcaaattcttttgccccgaatgctgcagttcccacaaaagaaggaatgcttgcacatacaggataagcggctgcagcaaagataaccgtcagtaccatcagatacgtggcaccgcttacgggccataataccatacagataaaggtaagtataaatgcagcgcacacataaatgatgaagccactagtcccaagcttattggaaattgttccggcagccatcaaaagtagtcccgccagcagcagatagatggcattccagtttgcggccccggtagctgtcattccgttcatctgccaccaggttggagcataggacaggtatgctgttccccctattgttgagaaaagcagggctgccacaagtactttaaaagaagtggatgatatggcctctttataggataccccaggaagttttgccgcttctgtctgtgcaaaggcactgtcccagcccaaaggcttttgtcccttctcatctgttgtcttaatcagaaacagaactgcaaacaaaccgatgatcagtacaagaacagagagtacgcgatagcagtttttataatctgtaactttaaatagctgtcctgccagaaaaacccacactgcagcgccgatacctgctcctgaaagtaccatgccggtaatctgagcccgtttttctacaaaccactctgcaatcaccgatgagcagaccgcatgcgtgccgaatgttatggagaaagaagccagtgcaccagctaaatacatgagaatcaggctttgtacatttgcacccggtgtaacaaaggtatacagctgcatatgtgccgcacacgccagtatggagataaacatagttttccgtgcacccagttttccgagggctttaatagctgcaagactcagcactacattgcatatagtattaactgtaccgatctggcctacagcaccgatggagtgttcactgtaagctgacagagatgccaggaaagtccccagggtggtacaagcccccagattaacaaaaatcacaagaaatgcccctactgcggctttataaccaaaaaatcctttttctgtcttcactttgtcctccttgtgttttccttccttattggagcgccatcgcagcgtagaagccttcacggattgctttgcccgcttttcccgccttcagacagtctccgattaaggttgtcttcagagggtatttttctgcaattgcctcagccacagaactgttgggtttttgtccaaaagcagtaattactctgtctgccgcaatcacctttttctcccccactgcggtctcaacagatactccttcctctgtgactcccgacacttttgtatttgtcagaattgttactttatattcggccagaagcctgtccagactcaacttgttgatcatcattacatcccgggcacaggcatccatcatttctactatagtaaccttcttcccttccattgccagctcaagggccgtatcacagcctgaaagccctcccccgcagaccacaacatgttcctcctcaatcccccggatgtgcgcctgggtcacatctattacttttttgtcatccatcccggatatacagggcacaaacggaacggagccggtagctgcaaaaatctcatccgccaccgcaagacacggatcctgaggagagacctttgtattaaactggatcttaactcccaatttttccagctgaattccgtaccattccatgagatcacggatacgctttttaaagggtgcgctggcaatagctctgaaggttcctcctattctgtcggatgcctcgtaaattgtcacatcgcatccccgcagggcagcaactctggcagcctccagcccccccggtcctgctccgataacagcaaccttctttggagtaggaagcggtgtaatctctaaggcgccttccatgcaagcctgtatgttaaccgtgcaggaaagctgtgtcagccttccgaaaatacgtccgatgcactcttcattacaaatcagacagggacggatgtcttccctgtgccctgctttcagcttatttggaaaatgaggatctgcaataagctgacgtccgaagctgataatgtctgcgtttccggattccagcagtttcactgcggtctccatagaatggttgcctgcattaatgattgggatacttacatgccttctggcctcctcacagacatatgccatacaggcctcaccggtataacaagtgggaaaaatataatccattgtctcatagcagccggaatcgatatcaatagcatctaccccggcttgctccaacagccggatgataggcatagaatcctccagggtacgtcctcccttatacatatggtccagggagatacgaaacaggatggggaagtaaggtcctaccacttttcggattgaatccacaatttccgtggcaaatctcacccggttctcccaggatcccccatactcgtctgtacgttcattccattggggagagataaattgatctaccagatatccggcatgaccatgtacttccactgcatcaaagcccgcatttagagcaaactgagcagcaacggaaaaatctttcattatgtctttaatttcttctgtcccaagagggcggcaaatcatatccggattgtaaaaagaggggtttggggatgctgaaataggaactctctctccaatatccggcataccatttcttcctgtcccacagctgagctgaagacaaatcctgcctccccatctgtgtatacgctcggtaagcaccgtagctttcgggattgccctggtactgtgaagtgccagagtagggcctccctgtgcagttttttcgttgaggaacatggctcctgtcataatgagtcctgctcctcccttcgccctctcctcatagtatcggatgccttcctcactatctgtgccgtctaccatgggagtaaaagttcccattccagacatcatgattctgtttctcagacgcattccattgattttaattggctgtaataatttattgtaattgtaattcatctcacactctccttatctgcctgttatccttctgtctgtttatatggcagtccatccgccgtcgcaggttaaaatagcacccgttacatatgtagattcctttgccgccagaaatacaacggaagaatccagttccccatccctgccgggacggctcatagcagttcttgtaacgataaattcattcatagactgcatagcctcaggaccattagcctctgatgcaaaaaatccgggacagagggcatttaccgttactcccttttctgcccattcagtggccgcctggcgggtcatattaatgatacctcctttggctgaagcatacgcaataacgggaagctctttcagaccgccttttcccagaatggaggcaatgtttataacacggccgtaccctttctccagcattaccctgccaaaatatttcatgcagtaaaatgccccgtcaagatccagggaaagtacctttctccactcctcgtccggaagctcttccaaaggaatacagcttcctcccccggcattattcacaaggatatctaccgttcccattccagacactaccttttccacagctcctttgatctgttctgtatcagtcacatcgcaggcaaccgggaggcaggataccccaagtgcctcaatctccttcgccactgcttccagcttatcctttctcctggctaaaattgccacatcagctccctgacgtgccaatgccagcgcaaactgacgtcccaaacctgccgatgcccctgtcacaactgcaacattacccgttaaatcgaacataattgttcctccttttacgttgactctttttattgtttccgctggtaccaacaacgttttgttaattatatgtcaatcccttggcttcgtcatcagtaatactagaaaaatgcatctgctatttttgtgcatctgcacaacggcacagcactgtcttctattgttctatctgtatacttttactcctgtatatctggtgaacccactatttttatataaagtatttgtgatctgcttaacaatctatatcattttcaataattaggactggcatttacggttttctatggatataataaaagatataaattattgttatatgtatttttgtacaaggaggcatgtatggcagattccattgattttttagagctatatgaaaaaatatttagagtactcccacgcaataatatccagaggcttatggaagtctgttatgaagtcgtgggtgtcccgatactgaccgtagatgtcatgtataaccttttgggcattgcccctaatgtaaaaaccggggattatcagtgggattaccttctggaaaataaaggctatgaaacagatatgattgtacgcctgtatgaggatggaattatgcagtccgtcaataaccggagtgcgccttatgtggttgactggggttcctgcagggataatcccaagattcagggcatcgtcaaagtaaatgatatcgtggaaggatacgtcactatgcagtgcacatacgatcagatcacctccgaccgtctgaaagccatggatattatcatgaatgtctgtgctctttttttccgtgagagcgattctgaaagcagtatgccctacacatatcagaaagtatttgcaggagaattatttaatcaccgtattaaaactcccagacagcttaccatgtggcagaaggatatgaactgcgacttaaatcctccctatcagatctttgctgtcagtacctatgataaaagtgagaaaaatgtattgtcctacattcggaaactgagtcagcagttttctccttaccagttcgcactgattcaggaaaatattctctatgtgcttcactataatatgaagaaacgaccgagaggaaattctgaggaaactttatttgttaaaacgctgcgcaggtttaacggctgctgcggagccagcaggtactttgacgatcttctctgcgcttcagactatattaaacaggctgaagacgctatgacactggggcagtccatgggcagacccaatggtgtccactattatgaaaacctctatctgccggcaatactggctccacggctgtctcagatgccacggaccaattatatctcccctgccatcccacttttggaaacttatgacagtgaaaactccacggaatttttaaagaccctggaagcctataccaaaaacctgttccgaacctctgaaacagccgcacagcttcacattcacagaaacaccctgctttacagggtacagaaaatagaggagattggagatttttccctgaaagattacagcacggttttacaccttatgattagcttttatatgctggatctggaaaataattataatacatagatgatttcatgatataatgagcgttagcgaggaaaacttgcccccacgtttgacgaacgggggaattggaaggagctgaaacatgaaagaaatcatcactctaccggacaccaggttccacaaagcgattcgtcttgtcagccttctgcttatcattggaatgttcctgaatattattcttttctggcgcacgattcccaatcaaatccccgggcactataacagtgcaggagaagtagacaggtggggcagcaaaggggagctttttctcattcccatcctgactttttttatgtttgtgggtatctctgtgctggaaaagcatccgtctgtgtggaatactggtgttgccatcaccagcaggaacaaagacagcgtataccggtatataaaaaacatgattgctgtactgaagcttataatgactgctgttttcgcctacttatccttctgtaccgtacacctcctgccgctttacaggcattttacagcactgagtctgattgccgtattcggcagtatggcatactatctcatacgaattctaagggtgcccaggtaaatgccgtgcatggcagcaagaaagaggacgcttctgccggagctttgaccgtcttgagctcccgcatagatcaatcttaacaaaatctgcacagaacttctgcatagaatcatgtatactataaagcaggagtgtaatctcccgcttatcccggcagtttctaaacacatacaaggttataccaccatatcatctttttctgttttaatcatccgggcttcctgatccggtatgccggaataagtgggtcttacactagctgctgttcatcctgtcaccagaaaggaggagtctctatttgagattgcaccatcgactgaaagaaaaagtccttgagtctgtctcctctgtccttcctattactgtaatcgtcttgattctaagtatcactatcgcacccttaaccccgggagctcttatcttatttatcttcggcgctgtgctgctgattctgggtatgggtttctttaccttaggggtagatatgtctatgattcctatgggcgaaggcataggagttcagatgagcaagtccaaaaccattcttatttctctggccgtctgccttattctcggtatcttgattaccgtggcagagccggatcttcaggtactggccaaccaagtacccgccgttcctaatccagtattaatttttaccgtagctgccggagtcggaatctttctcctcctggcggaagtcagaatgttattccagatcccattatcctacactctggtatttttctatgccattgtctttcttatggctttctgtactccggattcgtttgtccctgtatcatttgattcgggaggcgtgaccaccggcccagtcaccgttcccttcatcatggctttgggaattggtatggcgtctgtccgcagcgataagaattctaacagcgacagcttcggcctaatcgcgctgtgcagcatcggacctgttatggcagttctactgctggggatcttttatcacccctcggaggcagtgtacgccccttcagagattgctgtaattgccaccacaaaggatgccgcccatgaatttatcacaggaattccccattatgcaggggaagtaacaacagcactgcttccgattattttattattccttgtttttcagctgctgtttcgccgctttcacagacaccagctgctgaagattgtgtctggtctggtttatacctatataggtctgatcctttttcttaccggcgtcaatgtgggattcatgcccgccggacagcatatcggcgctgccattgcgcaaagtcagtataaggtattgctgattcccatcggtatgctcatcggttatttcatcgtaaaagccgaacctgccgttctcgtcctcacaaagcaggttgaggagatatcaaacggctccatctcccaaaaatcaattgagcacagtctttctatcggcatcgccctttctgtgggaattgccatgctaaggatcctaaccggaatatctatcatgtggtttttaatcccgggatacctgatttctctgataatgaccttttttgttcctcagatttttacaggtattgcctttgactccggaggtgtggccagcgggccaatgacggcaacctttcttctccccctggcaatgggggcctgcgaggctgtggggggcaatattctcacagatgcttttggaattgtggccatggtggccatgacccctctttgcacgatacagcttctgggactaaccagccgtttaaaagatcatcttcccccacggcagccccgggcaaaagaggagatggaggattgtattctgtattttgacaccgaagattaggaggtaagagatgactgcaaaacaagaaccgctgaaactaatggtaaccattgccgaacgccaccagggagccgtgctggccgacttttatacaaatcagggagtcttctggcattatcagtgctgtggtttcggtaccgcttcctctgatctgctggatgtattgggctttggcagcccggaaagagacattttgctaagtcttggaaccgcttcccgcattaccaggcttttatatgacctgaacacggagctcagagcccaggttgaggccaaaggcattgtttttgacattttgctcacaggaattaaccagctggttgcttccgttttctacgaaaataaaggggaaatccctgaggatactgcgaaaggagagattactatgactgcttatggagggtcacacagcctgattctggttgctgtcaaccagggacataccgatgatgtcatggatactgcgaaaaaggccggtgcaagaggcggaactatcctcaaagcacgctggctgggtacggaagagagcaagcactttttcggctttactctgcagaatgaaaaagaggtggtgattattgtagttcctgcccagaaccggaatcttattatggaggaaatcaataaggcccacggtatcagctccgaagcacagggcatgatctgttccgtgggcgtagatcaggtagtaaggctgacgtaacggtcagcccagcttatgatattctctgtaaaacagaattgaggtaacagataccgcaagaaagtccgcgattggttccgcaagaaatacgcccagtacctgatttggtatcagatggggcagtataaatatcagcggaatcagtaaaataacttttctgagcagcgcaagaaaaacagaggttttgaaattccccagggcgataaacgtctgctggcacgcaatctgtattccaaaaagaagggatactgccatgtagatgcggatcgcccattttgtatatgccgcaagctctgcattgccggtaaatatagcgataaacacctggggaacaaagatactgatggcccacaacagagacgaataaatcatagagcttttcagcagcagatgaaacgcttcctttaccctctgaatattctccgctccgtaattaaagctgatgataggctgtgccccctgcgtcagcccctggagaggaagcatagaaaactgcatcacactggtaaggattgtcatggctcctacagcaatgtcacccccgtatctcagcagggaagtattaaagcatacggacagtatactctctgtaaactgcatgataaaaggggccgcccccagtgccagactgggaaaaatatattttcctttgggacgcatattcttaagacggattctaagggtgctctttgctcctgtaaggaactttacaacccagacagaggataccgcctgggatataatcgtggcaagagccgcccccctcactcccatatcgagcccaaaaataaagatgggatccaggataatgttgcagacagctccgattgctacagtcagcatccctgtcttggcgtatccctgggcattaataaaagcattcagtcccagtgacagctgaacaaatatagtgccgatggaatagatctgcatataggcccaggcatagctgatggtattgccgctggctccgaacatcaggagaatgggttttccgaaggccagaaatatgactgtgagaagtatggccagcaccgccagcatggtggtacagtttcccatgatcttctcggcctcttcgttcttcccttttcccatcataatggacgcccttggggcacctcccatgctcacaagggctgcaaatgcagagatggccattatcacaggcatagtgacccccactccggtaagcgcattggggcctatatccggaatatgacctatgtacatcctgtccaccatattatacaaaacattaatgatctgggctaagatagccggcagcgccagcttaaaaagaaggctgcctatctgatccgttcccagactggcttccttctgtgtcttttcatgactcatgacaattgctctcctttcagcattctctcaacattctcaatcatcagccttaaggtatcattggttactttcttatattcttccgggattccttcctccagcctggctgccagctgctcctgcgtcttctgcaggtcacctacgatctcaggatcgctcagcttcaggtggataaccctgtgatccctctcatctcttcgggtagtcagataccctctggctgtaagagattccacggatctggccaccagccctttggatattcccttacacctgacaatatcccgggaagtgtccaaggccggagcattgttgtataaaaacaaaagtacaatcatctcattgggtgtgaatccgtaggaagccaaggcctcctgaaaatattttcggtaaagtttttctaactttatgaatttgtcgaaataaccccttcctaattccagcattctctcttcccttccaatagtttttcagtaaacagtttacccgtaaactattctatgcctttcccctgtttttgtcaattcctattctataaatattcttttttgctggtgaatcccttcccctttacttcttttaccgggcttacaatcataaatgcttcttcgtcaatcttttgtacctccttgttcagcctctgaagctcacgtccggagattacggtaaggatcacaggaaggctgctgcgaagatatccggtttccccgtgcagcagggtggagctgcgatccagttttccaaggatcatctcattgatctcctcatatttttcactgataatttttacctgggttttgctctggcccataagaaggactttgtccagaaccatggtgtaaaggaataccagaagcagtccgtacaaaacctgctcctgaacggaaaaaaggatctgcagcagcagaatcccgcagtcacacacatacattacagctgagatgggaagcccccagatcttgttgcataccagaggaggaatgtccatcccaccggtggaagctcccgcacgaatcacaatccctatggctgttccaatcatcacacctgcgtacagagccgacagcatgtgatccgaagtcacgtttgccagagccggcacagattgaaatatcccaagtacgacgggataataaaaggtactgatgatcgttgtcattgcgaatttctttcccagaataaaagcccctacaagaaacatcaaaacgttaaacacgctcacaaagcctgtgaccggaatctgaaaatagtggttggccacgattgcaagacctgtggtacctcctgtaattaatccatttgggaggataaacatggtaactgcaagcgcatagatggtattgcccagaatcaccatccctacatcctttcctgttctaataacctgttccttcattattttcctcctttttactgtgctgataaattagtactctattctgataaatcagaaaagaaaaaagccatgccgggtattggcatgaccgttcttatccttctatctatctgattgctgttacatttgattctatctctgttcatatgtaatttactcctgcagtaaaaatcatagcacagccctctctatctttcaagtatctatttccgaaaatgacaatacctttcctacaaatgacgattggtcattttctggttgtaaactacaattacccatgctaaaataacaatatattttcagaaaggtgcataataattatggatgaaataacccgattcctggaagagttctatgcctccctgccccctcaaaaggccgacgccgctgtcagacaaaggcttcttaaccggttggaagcagaatatatgtcctacctttcccagggcagaccaaagaaagatgctgtttctctcaccctgatgcatttcggattccaggatgctttggacacagagctgcgaaaggaaaagcttcttgacacttataaacgtttccgcataaaatatcccctttttatccggggagggtttctgggtattctgattatcccggctgtgtttctaatccttatgttcagcctggaatcaaagctcatcttccttacggcatggattgtgtccatcatccttctggccgtttatctgatctgtgtggaatacattgactatcgctataaaaaattgctggaggcagaaaaattattagagggagagcagaaatgaaaaatatatgcagaatctaccggcgagacgtacaacgcctcactaaaaatgttatggcactcgttgtagccatcggcataagcatcatacccgcactgtatgcctggtttaatattgcggcaaactgggacccatacggcaataccgcaggtattaaggtagccgtatccaacgaagacgagggctgccgcctggaagcactctctctgaacatcggagatcagattatatccaatctgaaggccaatgaccagatcggatggcagtttacagatacaaaaactgctctctcaggggtgaaatccggcaaatactatgctgctgtggtcataccctctgatttcagccaaaaaatgtccagtatactttctactgatattgaacgtcctcagatacaatactacataaatgaaaagaaaaatgccattgctcccaagattacagataagggcgttggtgtaatccagcagcaggtaaacgctaccttcatcagcgaggccacagaggcaattgcaggggtattgaacatgaccacaacagatctggaagataagcaggtcacgattcttgaccgctttatctcctctctcaatactattgatggggatctcgaacagtacgaagagaccatagacgcctttatctctgccgtagatgaggttaatgggctcgtggagaccaccagactgactttgccggatgtagatactgccctggacaacggcaatacagcactggccgatgcccagtctattatggatgcctcccagacctctctaagcgacatcacccagggaattgggaatatcctggattccagccagggactctatgactctgtgtcctcaactgccacagatgccttctcaggaataaagaacagtgtggatgacgccgcagggaagctggagcagaccacttctctctcccagtctattattgatatgaacaataagaacattgcactgctggaaaagttaaataccaccctgggattatcttccattgaggatttgatccttcagctgcagcagtccagcgagcatcagcaggggatcattgacaggattaccgatacctcagaatccatcttgtctgcctccaatcaggccgccgaaaccagagaggatatccaggctctgattaaaagcagtacggaagatctggcctctatccgcacttcctaccgcactgccgtacagccctccctggacagtcttctggataagatctccagggcctcttcggatctctcaggtatgctgaaaagcgcggacggcagtctctccaatatggatgggatcctgaacggtgttggaaactctctcacctctggaaaggagtctcttgcaagtacgaaagaaatcatcgaaacaacgagaggtaagattcgcaagctggttgacggtgtaaattctgtagggcaggatgaacggatctccaaacttctggagattatacgcaacgatcccgcaattatgggtgactttatgtcatccccggtacagctggacactaattccctctattccatagaaaactacggttctgccatggcgcccttctattccactcttgcaatctgggtggggggcattgtcctggtagctattatgaaagtaagggtggatgaagacgaaaagctaagggatttaaagccctctcagtgttatctgggacgctacctgctgtttctcaccttcggtctgatacagtcttccatcatctgccttggggatttgtttttcctggagatacagtgtaagaatccggtgctttttgttcttgccggaatgatctgcagcctggtatttaccaatattatctatacattgacggtctcttttggggatatcggcaaggcactctgcgtcatccttctggtgatccagatagccggggccggaggcaccttccccattgaagttacccctcagttttttcagaatgtatatccctttctgccgtttacctacggaataaatgcaatgcgggagacggtagcgggcatctaccatatgagctactgggcggatattctccatctgctgctctttatcccctttgccctgctcttaggtcttgtgctgagaaaaccgctcatccggctgaatgaattctttgaaaaacggctggaggatacccatttaatgtagcaccttatagaaaggagcacccttatgaaaaatatccctttactgctgccgctgatccccgacgatcctctgatgcccctggacactgtccagggatttcgggttcgtcccggattttttgagattaacggagccacctctctgccgggagctgtgaactttacggtccattcccactcagcggtttcctgtgaacttctgctttacaaacgggaagcctcagagccctacgccgtactcaaatttccggacaattataaaataggcaatgtttattccatgctggtcttcggcctggatatcggagaattcgaatacgcctaccggctggatggtccccgggaccctaaaaaagggttattgtttgacaaaacaaaaccccttctggatccctatgcgaaagcagtaaccgggcagagcgtttggggcagcaagcctatccccggttctgcctaccatgcaagagtcgtcaaaaataactttgactggggaaacgcccgccagccccttcttcccatgcaggatctggtaatttacgagctccatgtcagaggctttaccaaagattccagctctcaggtccgtcaccccggaacttttgccggactcatggaaaaaatcccttatctgaagcagctgggcattactgcggtggaactgatgcccatatttgaatttgacgagactatgggaaaaagagaggtgaaagggaagactctcctggattactggggatacaattcggtgagcttcttcgcccccaacaccagctattcctcccagaaggaatataattatgaaggacatgagctgaaatctctgataaaagccctccacaaaaacggcatcgaggtaatcctggatgtggtattcaaccacacagcggaggggaatgaggatggtcctttcttctcctttaagggcttcgacaataatatttattatatgcttacccctgacggacactattacaacttcagcggctgcggcaataccttaaactgcaatcatcccatagtccagcagatgattctggaatgcctccgctattgggtgacagtctatagggtggatggcttccgcttcgatctggcaagcattttggggcgtaatgaagacggaagccctatgaataaacctccccttctccagacactggcctttgaccccattctcggcaatgtaaaacttatcgcagaggcatgggacgccggagggctctatcaggtaggcaactttccctcctggaagcggtgggctgaatggaacggcaagtaccgggacgatctccgcagctttttaaaaggagactactggatggccccagaggcagctaagagaatcacaggctccccggacttatataacggacagtaccggggatataactcctccataaattttatcacctgtcatgacggctttaccctgcacgacctctattcctataatcaaaagcataacgaggcaaacgggtgggataatacagacggtacagatgacaaccgcagctggaactgcggatgtgaaggtccgacttcagatcccgccgtctgtaccctccgaaagcggctcatcaaaaacgcctgtgccgtcttaatgtgcagccggggaacgcctatgtttcttgccggtgacgagttcggcaattcctccatgggcaacaacaacccctattgtcaggacaatgagatttcctggatcaattggagggatctggatgccaacagggagctttttaactttttccggtttatgatccgctttcgaaaaaagcacgtttccatccgcggaggaaaaggaccctgttcatttggtttcccctttatcagcctgcacacagcagtgccctttgattcaggaattactcctgacacaaaagcaatgggcgttatgtatgccagccagggcgagcgtccggataccgatgatattgtctacctgggaatcaatgtgtattgggaggaaattacgattcagctgccgaagctgccccctccctacggatggtatctggcggcaaatacggcagctgatacagaagattcctgtgtggcctggaatccgaaagatatggtttatatagagaatacgtttgttctgggctgccgttcggttgcggtgtttacagcctgcaaaagacaggaactcttaccagaccagtaaatcggctccccaggtgagtccggctccgaagccggagagtatgatcttatcaccccgcttcagcattcccctctgattcatttcatccagaaggagggggatgctggccgctgaagtattgccggtggactgcaggttcatggggaacttgtcttcccctgccccgagacgttttgccacggattgaatgatccggctgtttgcctgatgaagcacaaaatattttacctcatctattccggtacctgactgctccagaacctggcggatgcactcaggtactttttttactgcaaacttgaatacctcctggccttccatagtaatatattcccggggcagttcctccggcaccagcagattgcggactgtgcggttccggcaggtgagaacctgggatttccccccgtctgcatgctggactacagacagaagacctgtgctgtccttttccactacagcagcgccggctccgtctccaaaaagcacacaagtgcctctgtcttcccagtcaatcagcttggagattgtctctgtaccgatgacaagggcattttggtacatcccgctctccagatacgcatgtgccgtattcagtgcaaaaaggaagccggagcaggcagcactgagatcgaaggcagccgcttccggaattcccagctctctcatgacacaacaggctgtgctggggaaaaaatagtctggagaacaggttgcggcaattacaagctgtatctcctccggatgtttgtgactgtttttcagcgcattcagagctgcctcggccgccagactgacagtcgtttcgtctttggcgatccttctggcgcgaatgccggtgcgggaagagatccactcatcacttgtctccactactttagaaagatcatcatttgtcactattgtcttcggaagcgcacttccggttcctattatcctcgtagccattctattatccacctatacttttatattatctcgctcatttattttgactatcaaagtatatgatgatttctggcatttgtcaatatgtctctgttttaaaagctttctggggatgtttttcctctttcagatatacatgcttaatataacgaagggttttcacttctccctctctggccagcatgcgcagaagtctctccagatcctggttggttttctcgtggacaaaccacaatttttctttcccggccataaaatacttcagcggcgcctgatcggtgtaggtttccggagaataggttctggatgcgctgatccggtccataaccatctcagcaatatattttctgggcatgggcacccctgcaatcacggtcttgcagtttactccataatccacccagtgctcaaagtgatgcttatttctcccatagtggtgcatccaggaggttgacattccggtagcctcccgctccgcattattaggactgcggtctccctggtaatacctgcatcccaccctgaactccgtccatgaatatttagacaaatcgtgcagcagcccttgtttatagaggccaatgcggaagcagtacctcattaccatcaatttatgttttgtaattgtcttaaaatgtgcccatgcatgcatacgctcttacatctcctactttcccaccagtacaataattgttctcggggatactttaatccctttttggtctttcaccggaggttcttccatttcctcatagaagccggcattttcatttttccctgtatctatagcaacccgccattttccatttcccggaagatgcggcagggcaaactcatgctccagccaatgcatattatatgcaatatagatccatgtgtcagaaacccccgcagaatcctcggcatattttccgttgtacatcactcccacatggcggaaattattatccagttctgcaaaccaggccttctggctgtgataggaaacatccgggctcccatacgatttgtaatccatgcaccgaagttctcctggcatatgcagcacaggatgggatacccggaacgcaatactttttttcacaaattccagcagttccccattccggcgcagaccgctccagtctacccatcccacttcgttgtcctgacaataggcattgttgtttccattctgggaattgccgatttcatctccctggtaaatcagaggaatgccctggctcagaagcagaaacagaaaactgtttttgatctgctgttttctgagagttttgatgctctgccttctggtggggccttcgatgccgcagttccagctgtaattataattcatgccgtccctgtttttctcaccgttctcctcgttgtgttttatatcatatgctactgcatctgccatagtaaacccatcctgaatactcatgtaattcacaactccatgggtatccgggtttcttctggtacagtaggtaaaagcccccagcatatcctcgtcccctttcagaaaacgtctaaacacctgacggctccactcattatattccgccagacgacggaaatgaggagttttgtttttatataatttctgggcatctaccccagcaaaaaagagtttggtatctgccagcagcggatcttctgtaatataatcctgcgccctggtgtcccccaccagatggaatccgtcaatatgatataccgttttccagtacctcagaatatccagcacctcaagggaagagatctctccagtaaaataaaattccataatgcactcaatacccgcctggtgaaaggctcttaccatctccataaattctctggccggccttccggttgcacagtaagacgccttgggtgcaaagtaaaatgccttatccgtatatccccagcagttcacctttgcagcatccttatgttcataagcatatgcggcaggaatcccgtccttcaccattatttcatcaaactcatagcatggcatgagttccacagaggtaatccccagttccttcaggtacggtatctttttctccaccccctgaaaggtccctttttgtcttacctttgaatttttatggctggtatatcccctcacatgcaatttgtacaaaatcatttctgacaaagatattgcgggccgttcttccttttcccacaagaatttcccctccagcacaccgcaccgaaggctgtgtggattcttgtgatccacagcagcgccgaaaacttctctgcctatgagcagtgcagccctggggtcctgacggatctcaccgtctattttataattgtactccatctctctgggacggaattgctctataaagacagccgccacctccccggtcctttctttggggggcagaggaatctcttgtataagccttccgctgttcttctcatacagcaaaagacttgcctccttttcatccgggatgacacttgcaaaattatagccgttttttgctctgtacacgcctaatattctgggattgcctggtaatactctgatttcagcctcgttttctcttctcttcaagccttttccctctttccctctatactttattcttcagaacacagcttctccatcttgtcgtggactgttccggcatctctctcatctgtcatggtaataagtgtatcacttgcaaatactctggtcttgcccttgggaatgatttcctttcctcccctttgaattgcgaccagaagacaattctcaggcagcggaatctctctcaccagctgtccgttgatctctgaaccgtgcatcactacatattctgataaaaccttctgccccatggtttttggggtctgaattcccctcttctctaaaaggcgctccaaaagactctcatatattggggtggagcgcagtaaggttgccacgatataggccacaatagaaaccaaagaaagggacagcatctgatctacagtccctgtcatttcaaatataagaataattcctgtcagaggtgctctgacaattgctgtaaaataccccgccatagccaaaaggataaaattattaatgtattccgcctccaggccaaaaaactctgccccggcaatcccaaaggcaccgcctataaaagcccctaaaaccagaagcggaaaaaagattcctcctggcgctccggagccaaaacttatggcagaaaataaaaacttcatccctaaaagcacaagcacagtgcccagcaccatgttctcatgagtaatcatttccacaagctcatgaccgcttcccagcacctcaggcatagtgaatcctaaaacacctgccatcagaaacggaatcagcagtctggcagactcattcagacactttggcctctgatatagctcctgaaccttcagtgtcacataattataaaaggcgcccagcacccctaaaagtattcccagtaatataatcacccagtaatatttcagcggaagctcccgcccaatatcaaactgaaacacagggtcaagtcccagaacgtgggatgccataaaatccgccgtcagagaagccgtcataacagataccaatacagacacggaaaagtttttatggacctcctccagggagaacattacccctgccagcggagcatgaaaggctgcggaaagccctgcacttgctccgcaggtcagaagaaacttttcctctgtctttccccggtctaacagcctggagattccttttccagccatagctcccagctgaatagaagggccttcccgcccaagagacagcccgcccagaagagccaaacatccaccggccagcttcgcaatcatcacccgccaccaggtctgctccagctttcctgtcatctctccctctaactgaggaatcccgctcccagatatcaaaggctcccacttcaccagccgtcccacaatgtaagccagcgcagcaagaaccaccaaccacaaaatcatcctccagggcacacccctggcaaaacccagcacccagttcaaagcttttccggcatagctgagcataatgcggtataacaaagcgatccctccccctgtaatacctaccagaagcccttctccgattaaaataacgtttaacttgtccgcacgttttaaagtgtgcgcaacatccttcttcacgtatgattcctcccatctcctcttctgttattatagaggggggagaaaaaaaaagcaattagttttgtgtatgtaaagtcctgtatattaagctggaagtattgcaatcccctccttaatctgttagagtatctattgtagcaccttactgctacaataatttctaaagagaggtatcatcatgagcgacgaaaaatttatgggcggctgcgatcccagtgactgcgcttcctgcggaggcggctgcggctctgttcccagagtgcccaaccctaccataaagctgacactggaggacgatacggagctggaatgtgcagtacttaccacattcgacgtcaacgaccaggaatacattgcccttcttcccctggatgaaaacggcaagaataccaacggcgatgtatatcttttccgcttctcagaagatggggatcagcctgtaattgaaaatatcgagagaaatgatgaatacatggctgctgcagaggcatttgatgagtttatgtctaatctgaaagaggatgcaggcagtacagaatcataggcataaaaatagaaagctgcttatctgacagctttctatttttatgcctatgataaaggtcttatgcttccagacttgggataggaacttctatctcaacatcctggctatagtcaatgttatcaaaatggaacccgaacatatggtagaagtcctcccaatatccttttatatctgacagctcctccacattctctgtggtaatattctcccagcatttcataacctcttcctggatctctgccttcagttcccagtcatccatacgaatcttgtactcctcatccatatttacgggatctgagagcagcttatcatgaaaaagacggctaatctgctgaatacaatcttcgtggatcccctgttctttcattaccttatagagaatagcaaaatacagaggcacaatgggaatggcagagcttgcctgggtaaccagagccttattgactgatatatatgcgttcaccccaggatactcccggtttatttctaccgcagtgtgcatcagatgcttcttggcctgtccgatggtaccgtcagaatacatgggataggtaagcgcaggccctatataggaataagcaaccgtaatcgctcctttttccaatacatcagctccggtcagcgcttctatccagtctttccagtcctcccctcccataacctttatagttccttccatctcttccggggtcgcaggttctaccgtcttttccccgatggtgttatttcgcagatccaggcttttatttgtaaacgggcggccggtagtccttaacacggaagaatagaccgtaccgtccaaagtggtcctgcggggtgccgcaagactgtagatcaccatatctacttttcccaggtcttttctgattatgtcaattgccttttcttttatctcctgtgaaaacgcgtcaccgttgacagacctggcatacagaccttcctttctggcgtttttctcaaaagctgctgtattataccagccgggggttgctgtacgctttccgttagacggtttttcaaacatgatccccaaagtagacgctccgcacccgaatgccgctgtaattctggaagcaaggccgtatcctgtagaagcgccgatgaccaatacctttttgggaccatccatcctgcccttctccttaacgtaccgaatctgccgctttacattttccccgcatcccgccgggtgggcggtagtgcaaatatactctctcacctttggttctactatcataaataaatcctcctagttcatccacactgtaagtatctggttttaaaaactagatactttggctatcaaactattctaccacatttttcatagaatgcaaagaggattttttatcagtctgcggattctttcttacctgtcggtgctgccaaagccgccgtttcgtacctcacaggcatcatcatcaacggtaattccgtattctacaaagatcccctgcataaatccgcttcctgcgttcagctctatggtctttccttctctggaatcattagtaatcttagaaaaaatatgcccttcattttctgagtaaaagtaatcgctgtcaataatcccaacggtattattcagctgcatgcggaacttaaaacccagaccgcttctggggtaacatttcagaacccattccggctccatttccgcacggatacctgtgggtatttttacggtttcccctggctttacagttacactcaccggcgtatagaaatcatagcccgcagatcccctggtagctcttttgggaagggatatgctgctgtagatctctcttatctcttcttcgttacacttttccccaaaggtatctttccagtccttcagaaattgttcccagcttactttgtggaattttgcaattttcttcatgtgtattctccttttctctgccgctgtctaaaaaggacggagaaaatacgctttcccccgtcctgatctgcaacctttacttttcttcttccggaacatccttcatactgaagctgattcttcccatcttatctttcccaaggcagataacttttaccatatctcccagggtcagctcatcttccacccggttgatgcgttgtttggatatcttggaaatatgaaccataccttcttttcccggagcaaattccaggaatgcaccgaattccttaatactgactaccttgcctacaaaaatctgtccggcctcaaagtccgtagtgatgattttgatcatgtccatggctttttccatgctctcctgatctacgccgcatacagatacggatccatcatcatcaatatcaattttaacgcctgtctcctcgataatggtattgattgtcttacccctctggcctaccacatcgccaatcttggagggatcgatctgaatctgcatgatcttaggagcataaggccctacgctctctctgggcttgctgatgcacggctccataacttctgtgagaatatattctctggctgccttcgtcttcgcgatagcttcctctataatcggtcttgtgagtccatgaatcttaatatccatctgaatcgcagtgataccgtcatgggtacctgccaccttgaagtccatatcaccaaaaaagtcttccaggccctggatatccgtcagcaccagataatcatcatctgaatccccggttaccagaccggtggagataccggctaccggctttttgatggggacacctgccgccatcagggacatggtagatgcacagatacttgcctgtgaggtggaaccgttggattcaaaagtttcggaaaccgtacggatcgcatacggaaactcgtctacaggaggcagtaccggaatcagagctctctctgcaagcgctccatggccgatttcccggcgtcccggtcctctggacggtttcgtctcccctactgagtatgacgggaaattgtagtggtgcatatatctttttgaggtctcgtccacgtccagcccgtcgattctctgggcttcagccaaaggcgccagtgtggtaatggtgcagatttgtgtctgtccccgggtaaacatagcggaaccgtgaactcttggaatcaggtctacttctgctgccagaggacgtatttccgtaatccctctgccgtccggacgcttttgatccttcaaaatcatcttgcggactgtctttttctgatactgatacacagcatcatccaaaagattgagccactcctcattctcagcaaaggcctccgccagcttatccttaatcacactgatgttgccttcccttgtctgcttgtcatctgtaaatactgcttcctccatctcttcaggagtcacccgttccctgattgcagcaaacagttcttcaggcactgcacagctctcatatgtgtgcttttcttttccgcattccgccacaatggtatcaataaacttgataacttcctgattcacctcatggcatttaaaaatagcctcgatcatcttatcttccggaacttcattggctccggcctctatcatgatgactttttccctggttgacgccacagtaagcgccagatcggatacagctctctgggcgttgttcggattcaccacaaactctccgtctaccagccccagctgtgtcatagcacagggaccgtcgaaaggaatatcggagatacaggtggcaattgcagatccaagcattgccggaagctccggattacagtcagggtctaccgaaagcaccaggttattcaaagttacatcgttgcggtaatcctttggaaataaaggacgcatgggacggtcaattacacgtgaggtaagaattgcatgctcactggccttcccttctcttttattaaatccgcccggaatcttgcccacagcatataacttttcttcatattctacacttaacgggaagaaatcaatcccgtccctgggcttttctgaggcagttgcggtagaaagcacggtggtgtctccataatgcatcatcactgctccgtttgcctgttttgccacacggttcacatcaactgtcagggttcttccagccagttccattgaaaaactcttatacataaatatattctccttttcttgtgctggtagaagactccgaaacaactgaaaaatacatttcgtaaaatgtccttttcagtggtctcggcaaagttcttactaccgcaaaacagggcggataactccgccccttaaatgcctgattattttctgattcctaatttttcaattaaagcacggtatctttcaatatcagtcttctttaaataagcaagtaatccacgtctctgacctaccattttcagaagtcctcttctggagtgatggtctttatggtgctcttttaaatgctctgtaagctcctggattcttgcagttaaaactgcgatctgaacctctggtgaacctgtgtcacccggtgttcttgcatactctgccataattgcctgtttcttttcttttgaaatcatgttgtgcttcctccttaatcattataatcgcctcagattaagaaacggtcggagtgtccaatttctgaatcagggctattttcacaccttcatagtataacacaaggcatttccattgtaaactgtttttctctctattcatccagaattcttaccgcccagacagcattgtcatagtatatattcgagattttaattccggtttccctgctgcttgcatggatcacctggccatctccaatatacataaccacatgataaatttcaccgtccctggcataaaaaataaggtctccgggctgggcctcctcaatggagattctggttccggtctgtgcctgatccctggatacacggggcagtgaatatccaaaattggcataaacactctgtacaaaaccggaacagtccgcaccgtcagtaaggcttgtcccgccccacacatagggattgcccaaaaattgttcagcgaactccaccatctgggatcggatactctcagaggcttcagccacacctgcagtttccgccgcaggctcttcctcagccggatctgttatctcctcttgggaaatacttgtttcttcttccggaatacttacttcctcttccaattgggaggaagtctcttccggaacaccagcttcttcttcgggatcgggtgtttctttggccggttctgtagtctcagagtcagtgtgatccatcccggcaccggcagtttcagccccgctgccaatccagtgggcataggtcaaattctcttcctgcccctcttccgcatactctctggctgtctctccggtgaggagatatctgcttgacacgtatccccgtacatctcccgagacgatacaagcccacccattctcctctccttctatgatacaaacggcatcccttgggagctttccaataacagaatactccatccctccgccgcttcttatattaagatttgtatttacatcagcaattccatactctttatcctttgtatcagacacagtctcactcgtttcgccctgagattcctggtaccctgcgggaggatctgcccagattctttcagaggaaacgcccagaagcaccagtacagacatggctcccagtaaattacgtccttttctgtgcataatactttttataaagcctcctttgttacgtttgttttaaaattgttacatttatgttacgtactcattgtaccatgcaagtacagaatgtcaacaacattccgtcgggacaaaacgacaaaaaaacccggcatatggtaagtatatgccgggttttcaatatttatgcctgaacagcacctttcatgtcttcctccggatcctcctccaggatagaaaaggcaatattggtagcgtgatctgccaccctttccaggccggatacaatatctgagtagagcattcccgcgttgggtgtacattcccctctggtgagacgctgtacatgattctgctgaagctcccgctccattttgtcaatgttatcttccagctccaggatctcctgcatatggatccggttgttgttggaaaacatatccagggaatacgttgtgatttttatcacggcatccagcataccggacagctctgcctgcgcttctttgctgaaactgaccttctcttccatccttgtcctgcaggcatctgccacgttctcggcgtgatccccgatacgctcaatatcattgactacgtgaaataatcctccgatactttttgcatcgtcaatcggaagtgtagtctggttaattttcacgagataatccgtgatcgcatggtttaaaaagtctatattcttttccatagaatatacttttttcagctcctcctcatccagagtaaccagacagttcattgctctggtaagattcgtaattgccatatttcccatgcgttccagttctctggttacttctaccaccgctgtggtgggagagaacactgctttgtctccaatataaaccaattcgaactcttcttccccttttttcttgtcgtccccgggaacgatcaggtacgtaagctttacaatccactggataaacgggaacagtatgataacttcacaaactttaattaacgtatgggcattcgccacctgccgggccacgctgtcgccggaaagcctctgaataattccggtaatcggctccagtgcaactgtcaggaacaccaggataatggcggaacctacaatattaaacaaaaagtgaatccatgctgcccgtttggcatctttcttgccgcccaggctggcaagcagtgcagatacacaggaccccatattgcatcccagaatgatgaaaaagcaaataggaagcttcaaaagcccctgggtggccagaagaagaacaatacctaccgtagcggaagagctctggagaattgcggtaattacaaatcctaccaggatcgccacatagtggttcttcaaagaggcaagcatgtccacaatctgcggggattcttttaatgtagacatagctccggacatggttgacagacccacaaaaagaataccaaatccaaggacaacctcccctgcctttttcacagagtttttttcgcagaacatcaccataataacacctgccataacaaaaagcggcgctatttcagagagattaaacgcaattaactgtgaggtaactgtagtaccgatattggcacccatgataactcccgctgcctgcagcagtgacataagtccggagtttacaaagcttaccaccattactgtggtagcgctggaggactggacgatggccgtaaatagaatacctaccatcatgccgataaaacgattcttagtaaagaattccaggatactcctcatcttggcaccggctgctttttccagaccgtcgctcataagcttcatgccgtacaaaaacaaacctagaccgccaactaacgtcataataattcctaaattcatagtatctccttagtaaaaaatatgtctggatttattcaggaacgccttagcgtacccttgcgtaacatgcgccataccaggcacaaacgcctgctttcaagatgaaaatttaacatctttttaacgcagcacttctactataagataaaatttttaatttgtccatatcccaaacgaaaatattccctgcccttttcattatcctgcaggagctgctccttcagaagttccatagacccgaattttttttcatgccgaagaaaatgaaaaaataagacctcagactcttttccgtataaatcctcgtcgcagtcaaagagatacgtttccactcccagaaaattttcttttaccgtgggtttgtatcccacattagtaatcccctgataaacgttcccgtctatgatggattttgtcacatagacgccgttgggcggaaattttttcttcgtggaagggatgatattggtagtgggaatcccgatggttcttcccagctgtcttccccggacgatctctcctttggtaaaaaacgtatatccaagaagctgagataccgtctccatattccctttttccagttcctctctgatgtatgtactgctgatctctctgtcttcgtatctttccttttcaattatctccacggtatagccatacttaccggccatgtcctccagcatacgcacatccccccgccgttcatgtccaaagcggaaatctgtccccacgactatgcaggcggcatgcagacggttcacaagaaattcctttataaagttttcggcctccatgtgtatgacttcatcggtgaaggggcactccacaagatagtccacccccagctcctctatcatttccgcccgctcctcattggtcagaagagatttcagattggattttcccagttttacaagaggagagacatcaaaagtaaagatgactgtctgatagccatcttttccaatctcaagcaccctgtgaatcagcttctgatgacctctgtgcagaccatcgaactttcccagtgtaatcacactcttctgtccttcctcgaactggggcacaactgttgtactgatcatgtctcctccttaaacatcttaaccagcatataccgccggcgttcctcctgatactggtatatgccaataaacataccctggctgtcatatacccggacccatgaatcctttataggtatcatttggcccggacaggaaaaagaatttccattgtgcagcgccttatccatgctgggacttccacagatccggggatattcagaaaacatttcctctataggcagaacatcctgttccagaatgccgttttccttccgctgccgaatctcgtccaaagtaaggctttcctgtatccggaaacgttccacacgggtgcgtgtcagctgttccatacagccaccgcatcctaatttctgtccgatatcgtggcagagtgtccgtatgtaagttcccttagaacatgtaactgacagctttaccctgggaaggcacagctccgtcacatcaatgctgtgaaaagagaccttcctcgcccttcgctccacttctatgccctcccgagccagctcgtacagtttctttccatttaccttcagggcagaatacatgggagggatctgcatctgctctcccacaaatccgcggatacagtctcttacctcctcttccgtaacagtaaccggggattcttccagaatcctgccggaagtatcctgggtatctgtgaccgtgccgagcagcagcactgtctcataagatttatctttctctgtaagcatgtcgcagagctttgtagcttttccaagacataccggcaggacacctacggcatccggatccagtgtccctgtatggcctatttttttctgtttcagaattcctctcagttttgccaccacatcgtgggaggtatagcccttttctttataaacgttaagtactccgttcatgaaagtatttccttctctctcagctgtttttctatgtggagcgtaagattattgatcacatcataggagcttccctgcagggtgcatcctgctgcttttacatggcctcctcccccaaagtacgaggcaattgcactaacatccaccgccccgttggaacgcaggcttactttatactcctgggccgaagtctggtacataaaaaccgccgcctcaacgccccgggttacacgcagctggctcacaatgccgtccagctcttttgcctggataccgtagaattccatgtccttttcattgacaacacccacaatgcatttgccgttcagcacaagaatgctctccatgagacaccggccgagtacctgattctgcacataactctttgtgtaaaaagactcatctacaatatggctgaagtctatccctttatccatgagaacccctgctatggtcatggttctggaggatgtgcaggaatactggaaaacgcctgtatcatggacaatccccgtataaagagccgctgcacagtcggttgaaattttttcttcctccagcatttcaaacagcacctcgcaggaggagctgctgtcggggacaattacgtttatgtcgccaaaccccggattgctgatgtggtgatcgatgcaaagacgtttttctgcatgttcaaaacaggaaaacgcaacgccaatgcggtctggagcgctggcgtccagagtgataaacagatcatacgtttgatcctcccggcagatggtctgtatctggtccaaatcccggatataggaaaacccttctttaggctcttccagatatacgtccgtctcaagggaaggataattctctttcaggtacaggtaaagccccatgcaggagcccacgcagtctccgtccggacgtacatggcctgctatggccaccgtccggataccttccagctgcgaagccagtttaatcattcttatcatcttccttctgttcgaaatcctgattgtttacttcctgaatcaattttgacatattaacaccgtattcaatggaggtgtccagcacaaatcggatttggggggtattgcgcagattaatatttttggccagctgatttttcagaaagccttctgcactctttaaacctgccagagtatcttcctttgccttgtcatcccccataacactgatgtaggccttacaggttttcagatccggcgccacctcaacagcggttactgatgtcagcggatgaatacggggatctttcagatccccccggattagattggccagttctctttgaacttccccattaatccttgtattctttatactgttttttctcatatctattctcactttctgtcttttcaggtacagccgcaggcagccccctggattctagcgaggaacttctaccataatataggcttctaccttatcttcttcttttacgtcattgaagtcctggaataccaagccgcactcgtacccggcttttacttccttcacatcgtccttgaaacgcttcagagatgccagcggtccctcgaagatctgctcatcttcacgggtaatacgcactttgcagcctctctggaagataccgtccaggacataggagcctgcaatagtaccgatgccggaagccttgaaggtctggcggacttcgccgtggccgatgactttctcctcatataccggatccagcatgcccttcatagctgcttccacatcctcaatggcctgataaatgacgcggtacaggcgcagatccaccccttcctgttctgcaatcgcttttgcagtagcatcaggacggacattaaatccgataataatcgcattagaggcagaggccagggtaacgtctgattcattgatagcgcctacgcccccatggatcaccttgacaattacttcttcattagacagctttacaagactctgttttactgcctccacagaaccctgtacgtctgcttttacaacaatcggaagctcctttaaattacctgctttaatctgtgtaaataaatcgtccagagacatttttgctttggtatcctccagaagtttattcttaccttctgacacaaaggtctcagcaaattgttttgcctctttgtcgttgtcaagagcgacgagaatctctcctgcattgggcacatcggaaagtcccagaatctctacgggtgtggaaggacctgcttcttttacccgtcttcccttgtcatccatcatggcgcgcactttaccggagcaggaacctgcggcgataaaatctcccacctgcagagtgcctttctggaccagaatcgttgccacagggcccttacctttatccagctctgcctcaataacaaggcctctggcttttctctttggattggctttcagttctcccacctctgcagtgagaagaatcatttccagaagttcatcaattccgtctccggaatgggcggatacaggcacaaagatcgtgctgccgccccaatcctcgggaatcagctcatattcagataattcctgttttaccttttctacattggcacttggcttatcaatcttattgacagctacaattatctctgtgccggcagcctttgcatgattaatggcctccaccgtctggggcataacaccgtcatctgcggcgactaccagaattgcaatatcagtagcgttggcaccgcgcattctcatggcagtaaatgcctcatgtcccggagtatccaggaaggtaatcttctgtccgttgatacttactacataggcgccgatatgctgggtaattcctccggcttctttgtctgttacatgtgtattacgaatagcgtccagaagagaggtcttgccgtggtctacatgccccataacacagacaacaggcggtctggatacaagcaggctgttatcctcctcttcctctctgagcagttcctcgatgacatcgattttctcttccggttctgctataatatcatagcttaatgcgatctcctgtgccttctcgaagtcaatctcatgattaaccgtaaccaggattccttccaggaataacttcttaacgattacagacggctgcatcttcatcttttcagccagctcccgaattgtcatcttttccggaagggtaatctccttgatttcttccttcttttcttcctgtttcggctgaggattcggtctctgaagagctttcggaagcctctgattcggtcttcttcccccctggttcggccgctttccgccactgccctggtttttgtactcttctctcttgacatcctttttcttattatctctgttcagcttacggctgtctttgtcaacgatctcaatttttgaatctgttggtttgtttcttgtatccggaccatttttccgaaaatcattggttctccccgcgggtctctgaccatcattgcttctgtaacctccgcccggtctctgaccgtcattgcttctgtagcctccaccttgtctctggccgtcattgcttctttgatagcctccggctggtctctggccgtcattgcttctctggtagcccccgccttgtctctggccgtcattgcttctctgatagcctcccgctggtctctggccgtcattatttctctgatagcctcccgctggtctctggccgtcattatttctctgatagcctcccgctggtctctggccgtcattatttctctggtagcttcccgctggtctctggccgtcattatttctctgatagcctcctgtcggtctctggcctccctgaggtctctgataatttccggtccccctctggccgtcaccgtttctctggccgtcattatttctctggtatcctcccgccggcctctggcctccctgggttctctgataacctccgccgcttctctgactgcttccggttctctgattgccgccggtgcttctctgactattattagccggccgctgattgttattcactggtcttgaactattttcactcatagcttttacattactctctgttggcctgggagtgctgtccccctggcttgctggtgtattttgaacaggtttctcagtgtcactgtgtaccgggtgttctgtctgaggacggccctggtacgggcggctctgactggaacgctgagggcctttgcctcgtctgtcccctccattgctggcgttctggggacggaacacctgaataatattggatttctttttgggcttttcaaaatgctctttcactgccttcacatgatcgtcttccagactgctcatatggcttttgacttctatatttttctctttcagaaaatctaatacctccttgtttgttttatctagttctttagcaagttcatgtactctaatttttgacatacttactacctccttttctattacgaattcatttccagttgcttttcgattgccttagcaaaattttcatcggttactgccagggaagcccggaattcttttccaatcgccctgcccagttcttccttttctcccaggaaatacagtggaacctggtagtaagagcaggaatttccgaatttctttttggtattcccggaggctgactccgcgaccacaaccaaaaaagcagttcctgttttcacagctttttccgtagaaaattctccgctcacaactttgccggctttcattgccaatcctatcagagatagtactttatgatttatcaataacttctaactcctttttcaagctttcatacacatcttttggaattcccatctttaatgagcgttccagccctttattttttttggctttctccagacagtctctggaaaaacaaaggtatgcacctcttccgtttttcttgccagtcgtgtccagcacaatctcatcctctgttgtctttaagatgcgcagcatttctttcttacttttcatctcaccacacccaatgcacttgcgcataggtacttttcgaacagtgcccataactctcacttcctactcttcaacgtcttccggctcattatagtaaggctcagcttcttccgtatattcattctcatccggataatattcttcgccgtccccgtagtcctcttcatactcttcttcatagtaatcaaagtcaccggcctctctggcctgggtctcactctttatatcaattttaaagcctgtcagccttgccgcaagccttgcattctgtccctcttttccgattgcaagagaaagctgataatcaggcactacaacctgtgccgttttctcatcaggatccgccattactgaaatcacctttgcgggactgagggcattttcaatcaatatcgcgggattgtcactccagttaataatatcaatcttctctcctctgagttcctctacgatggcattcactcttgctccgttcataccaacacaggcgcccaccgggtcaacgtccgggtcgttggaccataccgcgattttggttctggatcctgcctccctggcgatgctttttatctccactgttccgtcttttacctcggtcacttctgattcaaacaaacgcttaaccaattccggatgtgtccgggaaactaagatcttaggccccttcggggtatcctttacctccagaatatacagcttaatacgctctgtaggacgaaaaacctcaccctttacctgctcattttccgtaaggatagcatctgctttgccaagattaatactataatttttgccaagatttctctgaacaatacccgttaccacatccttttccttgccatagtactggttataaattactttgcgctcttcttcacgaatcttctgaagaatgacgtttttggcattctgagtggcgattcttccaaactccttcgatttaatctctatattaacgatatctccgacttcatatttggaatcaatcatcttggcattggcaagactgatctccacgatgggatcctcgacctcttccaccacggtcttttctgcatataccccaaagtcgcaggtctccggattaatgtttacttttacattatctgctttgccgaaatgattcttacatgcctgaatcaaagactgctcaattgcttccaaaagagtatccttactgattgatttctctttttccagaatctccagtgcctctaataattctgtattcatgttacttcttcctcctaaatattaaaaatcgaatgccaatcgtatcaaagcgatatcagccttctgaaacaccatctccgttccgtcttctctggaaatagttacactattgtcatcgtatgctttcagaactccatagaattctttctccttttgaatcgcacggtaggtgcgtatttccagctcttttcccatacttctggcgtagtctttttctttcttcagcggtctcccaagccccggagagctgacttccataatatatgcttcctcaataaagtcttcttcatccaatttatcgctgaacgcacggcttaccacctcacagtcatctaccgttatgcccccttctttgtctatataagccctcagataccagttgcttccttctttgacatactctacatccaccagttcaaatccatgggacgcaacaattgggagaagaatgctctctgctttttgttcatacacttcttttttactcatgttctcaccacgctttccggatattcccttacacgcgataagagtggactcgcaagcccactcttatactgtagtattatttatatcttattaatattagcactaattcccagaaaaatcaagcatcttagaaaatttggtaagattccaatggatacacggtcggctagactcttatctttgtgccttttgtatctcttttcgccagcttcagtttattaagcgttacctctttatccttatatactatcgtatactcgctccgattttccagaagatatgcctcttccagcgcgtccttttctcccagacgtattccccgtactccaatggctgttttcttcttataaggaacttcctccttgagaaatttcagaaaatatccgttcacagactggagcaccacatattccatgggatctgacacacccacaaacagaagttcatcctccccggagagctttgtagctgcaatggtacgcttagatacatcaaattcctccccggccacctgcttaagcataccggtctttgttacaaacagaaggctggaagcttttacagactccaggcttcccgcatagagaatccgctcctgggtgctgtcataattgctcagattatcaataggagtccccttatcccggaatctcccgtagggaacctcctgtaccttaactgtgtgcatccttcctttgtctgtaaaaatacacactttatccgtattcatacaagtaaacagatatttactctcaccgtcagcggtttccttatttctctcataagttgccttgtctatggtctttgtatatccgaaacggtccatcagaaagactacttctgtctcctcaatcttcttttcctcataaactgcctctgcggcattttcgacagcggttcttctgggtctgccgtactcttttttcacggcagtcagttcctttattatcacattggccattgaatcatagttatttaagatatcctcatatttcgctatattggcaagtgtgatctcatgctctttcaggagagcctctatctccaggccgattaacttatacaggcgcatctccagaatagccgtggcctggcgctctgtgaatgtcagctttttagctgcctgctcgctggttttgctcttaaagcggatcccctctgttattccctgaatcagacagtcttttacctgcttctgatttttgctgcccctcaatatctcaataatcaggtcaatgacgtcgcatgccttcatcaggccttcctgaacttcttttttctcctgttcctttgccagcagtgtctgatactttctggtggccacctcaaactgaaaatccacatggtattctatgatctgcctgaggcttaaaatctccggccggccatcggccactgccagcatatttgctccaaaggtatcttccagccgtgtctttttatagagcatattcataaggttttccgcatctgcgccttttctcagctcaatgacgatacggatgccttcctttgatgactggttggagatgtctactatatccgtagttttctttgtctctaccaaagacgccacatcgtttaaaaatttaccgatattggcgccaatcatggtataaggaatctcagagatcacaaggagtatctttccggcttttcccttctcaatctccactttgcctcggatacggatcttgccgcttcctgtctcatagatttggagaagctcatccttatttactacaattccgcctgtggggaaatctggtcccttgatatatttcatgagaccttccgtggtgattctgttgtccttcatgtaggcaatcacaccgtcaagcacctcccccagattgtggggagggatactggtagccatgcccacggcaatcccgtccgctccgttcaccagaagattggggatccgcacgggaagcacggcaggttctttctcagtctcatcaaagttgggtacaaaatccaccacatctttgtccaaatcctgaaggtatacttcctgtgtaatcttttccagcctggcctctgtataacgcatggctgcggcgccatccccctcaatagatccaaaattgccatggccgtctaccaggggcagcccctttttgaattcctgagccatcaccaccaaagcctcgtagatagagctgtcaccgtggggatggtatttacccatggtgtctcccacaatacgggcgcatttccggtaggggcgatcgtaacgaatcccaagttcgtacatgtcgtagagagtacgcctctgcaccggtttcagcccgtccctgacatcggggagtgcacgggctataataacactcatggcataatcgatatatgatttctgcataatctcagaatattcggttctaatgatattatcctgcattttctactcctcctatatatccagctgtgcatcacgggcgtgctcatagataaatgcttttctgggcggtacgtctgtgcccatgagtacctcagttacctgggaggccatacgggcatcctcaatttccaccctccggagcatcctggtctcaggattcagggttgtctcccagagctgctgggcatccatctctcccagtcccttgtatctctgtaggtggaaggaacctttgtgcttcttccgataccgctccagggccttgtcgtcatacaggtattcttcttttcccctggcaggcatggccttatagagaggaggcatagcaatatacacgtgcccttcatagatgagctccggcataaaccgatagaacaaggtgagcagcagcgtggaaatatgggcaccatccacatccgcatccgccataataattatcttgtcatagcggagctttgtaatatcgaaatcattgccgtaaccctctgagaatccgcagccaaaggcattgatcatggttttgatctccgcgttggccaggaccttatcaatggtagccttttctacattcaggatctttccccgaatgggcagaatcgcctgaaaacttctgtccctggctgtctttgcggaccctcccgctgagtctccctccactatgaagatctcacagataccgggatcttttttctcacagtttgccagcttgccgttggagtcaaaggaatatttttgtcttgtcagaagatttgtttttgccctctcttctgtttttcggattttggctgacttctccgcacaggccagaacatttttcagggtttccaggttccggtcaaagtaatgtacgatctcttcgccagtcacctttccggcggcttttgcagcatcctggttgtctagtttggtctttgtctgtccctcaaatctgggcgacggatgtttgatggagacaacagcggtcatcccatttctgatatctgcccctgtaaagttcggatctttttctttcagaatccccagctcacgggcgtacgtattcatcactgtggtaaaggtagtcttaaaaccggtaagatgggtccccccttccgcattgtaaatattgttgcagaagcccagaacattttcatgaaatccattgacgaactgaaaggccacctccacagtaatcccctcagagtccccggtaaagtagacgggctcatggataacctcttccttttgatttaaatccttgataaagcctacaatgccatccggttcatggtaagttactgtctccgtttcctctctgcgcttatcctcaaatactatagtcagtttgggattgagataggcagtttcgtgaaggcggctttttacctcagtagaagaaaagttcgttttttcaaatatctccgggtccggaagaaaattcacacaggtccctgttgcctttgtccttcccagcttgggcagcaggccgtcttccagctctatcgtaggaatgcctctctcataatggtcatggtggatgtatccctctctgctgatttttatatccagatacgtagacagggcgttaaccaccgatgagcccacgccgtggagtccgccgctggttttgtagacagaatcgtcgaattttcctcccgcatgaagtgttgtaaataccagacgctcagccgacatccctttggcatgcattcccacaggaatccctcttccgttgtcctccacggttgcggatccgtccgcctccagggacacccgaatatgatcgcagaagcctgccaggtgctcgtccactgcattgtccacgatctcataaatgaggtgattcaaacctttcctggaaacacttcctatatacattcccggtctttttcggaccgcttccagtccctccaaaacggaaatactgtccgcatcataagtatttttcttagccatactaacaatcctttcccttatttattttcaagcttcctctgaatttttccgattatctgcattactgaggttatcagaataatcccaatggcaatggatccggcttcctgcagcacccatctggcatagcgtccgaactcatcagcctgtcctctgacaaaaaagttcatcgtgtagtagagatttcctcccgggatcagagggatcaaaaagggaaccagcagtgtaattacaggggttttcaaaacccttgcaaatatctctgccatcactgaagcaaaggcggaggcagcaagaagtcccaccacttcgctctgagagaaatgctgggcggccagaaagactgcccaggtggcgccccctcctatggtaaccagaatgagcttcgaacgttttatattaaaaaagatggaaaaccccatggacccaaatgcggccataataatctgtatgatatatttgctcataatttatgctcctaatggaattaatacaattgcaaagccgactgccagggcaacggaaatcagcacagcctccagcaggcgaagtcctcctgagataatatctccgtgtatcatatccctgaccccattggtgagggccactcccggcacaagcagcataatattgccgataataatcttatcaatagaatgccccagccccatacgggtcaaaatccaggcacacagcccccctgctgccgaacagataatatttttaatgattcggttcattcccacccgttcattcagctttaccatacagcggatgacaagtccggtaactgcagcagcgactgcatccatacagtcacctccaaagaacacagaaaaacatgcggatatcattacataggccaggcacataataaattcgggatatgttttgctgttgcggatccgctccagacgttcatcgatcgcctcaatgctcaaatgatattcgcagatatccctggataggcggttgcaccgctccagtctctccaggtctgtatcataagccagaatccgcctgacctgcgtcaggatccgtccctctttggtatgaatggtgacgatcaaacaggaggttatggaaaacacatctgacttctccatctcataagcgctgcagattctggtcacagaatcctctacccggctgatctctgcgccggccataagcatctgcgcccccagttccagaatacgatccagcagtttttcataatccatagttctttctcttcttcctaataattttcaaacatttctattttgccataaaaggcaggaaaataccagacccggattcgtaaaatttttaacaaaaatgcggcataacataaaatgttacaccgcagaacgaatcatttcgtgttttgttttatttttttcatacccagaagtccttttgccgctattcctaccaaaatccccagaacagcgcctgccagcacatctgtgggaaaatgcacatacaggtataagcgcgagaacccaatcagggcggccagaagaaaggcagctattcccagtcgtttctccgtaaaccagattgcggttgccgcagcaaaccccgacatggtgtgcccggagggaaaggaataatccctgggaactgctatgagaagctcaattccgtccttaatccaacagggccgttccctagcaatcagatttttaagaatcaggttccccaggatcagattcagaatcagcgccagcataacaagtaccccgccttttctgtattttggaatacacaagagtacaattcctgttagaatccatatgattcctgaattacccagctttgttacagatgtcataatagtatccagcatgggagtatgtatcttttgtaggctgtccaggattgcgaattccattgaaatcctcctataatttatttttttattttacatttagtcgtcatgaccacaaggcagacaattgcaacaacaataatggccggaccgtagatcatgcgaatcacggtaaacttgtcagacagaaatacaaacgcagcctgaacaatggtgattagtactaccattacggtcattaaccgggttgcttttttctcatcatagatcttcatagcttctttgcccgatttccccatacttaaaagccagcttccctttcctgccagcataataagggtcaggattacaaggatagccaggataaaatagtcaaaagactgtacgtgtcccatggaaaacctccttcctctatctttatcactatatcttagattagagaataaatcaatttactttccattataatttaatatttagcatattttctaaaagctcaaggggaatttttaggtttcccttacctgtccccaggtcaatatccggcttattgctcccatggaagtctgaaccccctgagattttcagacaatgacgttttgccagatgtgtcatattcgtctcgtctacccatctatttgtagaataaatagcttccagggcatccaggcctgcatgtttcagctctgtgaccaatttttccagattggcatccgatagatgataaaggagagggtgggctagaacagccgctccttttccctggtggatcaggtgtatagcctgaaaaggggttaccttctctctgggaacaaagcaaggggcatagtcacccagatagcgatcaaatgcctcaggcatggaacgaacgtatttgtgatccagcagataacgtgcaaagtgtgccctggtccaaacagcatctgagaaagcagccttcatagaatcgtatgaaattccaatgcctgcctcttgcagtttggtaatcatttttagattacgaatatctctggagttctgaaaccgtttcagctcgttttgaaaatgatagtctccaatatcaatcccaagccctacgatatgaatatcttttccccaataatttgtagatagttctatccccggaataactcttacacccaggtgtctgccttcttcaacggcttcgggaatgccgtcggtggtatcatgatctgtaagggcaaaggctttcagccctttctgagctgcatattgtaccaactctgaaggcgaataggtgccgtctgagcaggtggaatgaacgtgtaaatcaacaaattctggcatgaaattactccttaaaattttttttaaaataattatacaaaaaagcttgcattttttcaagaaatgttatattatatacaagcacggttgagatatggttcgttggtcaagcggttaagacgccgccctctcacggcggaaacaggggttcgattcccctacgaactgtttaaataagccataaaaaggattcctggaattgaaaggaatcctttttatttttcataactataatatagaaatctagattatccttgaaacgccaggtgtatcgccattaacttgaatcttcagtgttgaattactaataatttgctactttctgaagatatttgatatgacggtatacttaatacatatataaagaatacacaaaaatgtagataacatgtaatactataattagtgctacataacctacggttttgtagtgaaaaactataaaggttgccctttataaaatgtaagaaggcttttcgtctcagcttaaaagggacaggccactcttaattggggacgtgttctttctagaaagaacacgtccccaattaagttttaaacttcaggtgcctctgccggaatgaagatatgatcatgccctatctcttccgttctttttgacttttcttctgcttctctgcagaaataatcctgagaatttaccaatacttttccccttttatctattttttcataagtaccgtcaggctgaaggatatgagctttcacattgtcatccagctgaatctgcaggatatgttttatttcttctttaattttctcgtcctctacaggaaagataatctccactcgtttatccagatttctcggcatccagtctgcgcttcccataaaaatttcttcctggccgttgctgaagaagtaaaagattctgctgtgttccagaaaggttcctataatggaacggacggtgatattctcgctgacccccgggattcctgtcttcagacagcaaatgccccggataatcaaatcaatttttacgccggcagcagatgcttcgtacagggcagctataatatccctgtcacacagggagttcatcttcgctatgatatgcgccgggcgcccatttgcagcgttttcccgctccatttctatctggtggaggaaacggtccctcatccagataggagcaaccaccaatttgttccaagtctttggttcagagtagcctgacagcatgttaaatactgcggtggcatcctctccgattctggcagaacaggttagaattccacagtctgtatacagcttagctgtggtatcgttgtaatttccggttcccaaatggacatatctgcggatccctgcctcttccctgcgcactaccagggttatcttgctgtgagttttcagccccaacagtccatagattacatggcagccggatttctccagcatttttgcccactcgatattattttcctcgtcaaatctggcctttaattctaccagaactgtgacctgcttcccattttcagccgcaagagccagggcagcaatgataggggaattgccgctgactctgtataatgtctgtttaattgccagtacatcgggatccttagcagcctgtctcacaaaatccaccacaggattgaacgtcatatatggatgatggagaaagatatccttccttcgtatttgtgtgaaaatatcttcatctgtctgcatatcaggtaccgggcaaggtttgtagcctggcgccttgtattcatcaaatccatccattccgtaaagtttcataagaaatgttaggtccagaggcccattgatggcaaaaatatcctcatctttgatagcaaactctgcctttaggatcttcagaaggcgttcgtccatcttgtcttctacttccaggcggatcacctcaccccactggcgttttttcagctgcttttgaatttctttcaaaagatccgccgcctcatcttcgtcgatggtcaaatctgcatttctcataatccggtaaggataagcgcagacaacatcaaaattcaaaaagagtttgccgatattccgctcaataatttcctccaggagtattactgcctgattccccttttcatcttccggcagccggatgattctgggaagtactgaaggtacctgcacagttgcaaattccagctcgtctttccccttcttatcctttttagagatcagtgctccgatattcagtgtcttgtttctgataagtggaaatggccgggcagagtccatggccatgggggtcagtaccggataaacattatcttcaaaatattgatccgcaaaagcacactgacgctttgtcagatcttcatgctcccgaatgagagacaggccgcattttttcagagccggaagcagggaacggttgtaagtattgtactgggcagcaaccagttcctgggtgcttttgctgatctcctttaactgctcttttggaggcatacctgcaatatccggcttcgtatatttggcatgtaccatatcctttaaggatgccacccgtatcataaaaaactcatccagatttgacgctgttatacttagaaatttcagtctttcaaacagaggcagggatttatcttttgcttcgcttaataccctctcgttaaatccaatccagctcagctcccggttccagaaatattcagggtttgtataatttactatttccatcttatgcctcctattttctcctttttcttctcaattccggcctgataaaataaatctcctcaaaaaagtttatcttgtctgccagcagaccttcttccagggtaaaatccgcctgactctcaatggacaggatcagccggttctcttttacagaagcatgaagcgtttctatcttctgaagatggcttctgtccagagcattcgccattctgaggatagctgtcagttttcccaccaggatatagttttcctgtttcatttcctggtaaatgccatcctccccgtaatacacatagggaactgtattaaaacggaccacattggcaatcacttcccgctctgcatgagacagaccgataatctccgttgacataataatattgtaagagcattcccctacattgctcagactgatatatttgccgcagtcatgtagaataatagcaatctgcagcaggaggcgctctcttttccccatgccatgatattttttcatactgtcgaatatgacaagtccgatcctggtcataacctggacgtggcctttgctgcttacataccgctttgcaatatttctggccgcttcaataatatcattttcaaaattatgattggttcttatgattttatggctttcaccatactcataagccataccgtctgtaagctgtgttccggggatccacatggtttctgcaccaaactgctcaataaaagttttaaaaataataatcgaggggatgagaagtgacgcatactcaaggggcagggagaattccacagccacctgctcgggtgaatagggaaccacgcgatcatagacattcataaacgttgccttgtcaatcgtggagcataggttgccattttcccccttacggaaaagcacctccgtaaaattatcacctaccagaataacatttttaatttcccgttctttcagatgaagctttttaaagctgagaatctcattgttaatcaattcctctaccagctgctcgtaatatatggtttccttttccacaggaagcagcttctcacgaattctcagattccccagtttaaaattctgggtggtcaccagcgcgtctttgtcaaaaagagaaacctgtacgcttcctcctcccacctctataatagcggttcccttctgaataatctcagtaaaatccttctcctttgaggctatggacttgtagcccagaaaccgctgctcagaattgcttaatacttccacatgcatcccggttcttctgtaaatctgttccagaatcacccacatattctccgcttcccgcagagagctggtggcacaaaccttataatcctcaactctgtacccctccataatatgtctgtagtcattcaggacagtgcagagagaatccagagactccaaactaagcattccagtcacatacgtatctttccccagctcaagcggactgcggatttcatctatttcatgcattccgtattttttggacagctcatagatcttcatgctgatatcataagagcctatatccacggctgcaaatgttgtaatagccatactctcatcccccttgtaatatttcgtgtatttttaattattttactattaatcgtctgaaaatgccagggattttacctatattttacattttatctccgtatctactaataagggacacccctgatcgaatttgggacgtgttccttttaaaaagaacacgtccccttttggcccaataagtaatcaataaactgctgtgctgtcctccctgacagtcctccgtgctgcagttcccaggcgttggctttctgcagtagttcttcttccggcatctccactttgtaccgctctgccaatgttctgacaatattctggaattcttttttgtccggtgcgcagaagaagatggatactccgaatcgggaaaccagagagagtttttcctgtacggtatctgaagcgtgaagatcgtctctgcgttcttctttgtcgctgaatttttctctcaccaggtggcggcggtttgaggttgcgtagattaggatattttctggttttttctctaatccgccttcaatcactgctttcaggtatttgtattctatctcgaattcttcaaaggataagtcgtccatatatatgataaaacgatagtttctgtttttaatctgagcaatcacatcatttagatcctgaaactgatgcttataaacctctatgatacgcagcccccggtcataatattggtttagtatagccttgacgctggaagattttccggtgcccgcatctccaaaaagcaggcagttattggcttttcttcctgaaacaaatgcttctgtattatcaatgagtttcttcttggcgatctcatatcccaccagatcatccagatgcacatgggcaatgttggtaataggcactatatccaccttttcccgcacaggtgaatgttccagccggaaagccttgtggagccccagcttgcctactccaaagtctttgtagaaggataccatatcctccataaattcttctgtggttgccgcccggctcagtttttcgctgagattgcagatgcggtccctgattcgtttgttaaacattttactgttttcattgacatttacataattacagatgctcccacagcagcaggaaccaaatgcctcatccagttttcccaaatcaaaatcatagagcttcttaaatacagcaaagtcctgcagtaccaattcgttgatactcccttggactggcccaacgatttctgatgccatactaaatgcattctcatggtttaccagcagaaatgtgaggtaattgtgccagagattcccagcaaatccataagccccggacatttccaccagctgattcatgcagtcgtagaatactccacgccgctcctccagcgcttccctttcttctatataagtgttgatcagatctgtcatcttatgcagtacgtcttgctctctaaaatttctatatacaatacattcttccaactgaatcatctttatcctcctagtaattccccagtacccgcagctgactggcttccgcagagagaccacgaatggcatttttcaccgcactgtcccccagattgccctcaaagtccacaaaaaaccggtattcccagtttcttcccggtattggacgtgactcaatctttgtcatattgagaccattgtaaatgaaatgagacaagctgttatacagacttccgctctcatggggcagctcgtagctcacgctgattttccgggcgtccttccggtatttcttttcctttgatacgataataaatctggtagaattattctgattgctgaagatattcctttttaagacagacagcccatagaattcccctgccgactcactggcaatggctgcctgggtcttatcctggtcctctgaaacttttttagctgagacagccgtgttgtccagtgttacctgcttccactctttatgttcatttaaaaactctctgcactgcatcaatccctggggatgagaataaaccgtctcaatatcctccagtccggcacccggcacacccagaaggacatgctggcaaggtataatctgctctcccacaataaagtggtcatataccgtgagcaaatcatagatatcctgcacaatccctgcggtagaattctcaatagggagaacggcatactccgcatttcccttcttaatctcttccatcgcatccctgaattttgccacatgataattcttcacagaactgccgaagaatgtattcatagccgcaaagctgtaggctccctccactccctgaaatactacggtaacatcctcggtatccagagctttcacagggatgtagggtgtgtcttcctccaccgcgttcttttccagcagctgatactgaagctttctgctcatagccattatctgctgaaacagctcccggattccatggctggtaaaatcgctgcctgccttctccccgagagccttcaatttttccagttccctgtccttatcaaaaacagccttgcctgtctgtattttaaactctgccacatcactgcacagctgcatccgctcttcaaacagcctcagaatctcatcatctattccatcaatctgccctcttatcttcagcaaatccaacatcttttattctctcctttatccgtgtttcctgcaaataaatttgcgtattatttctaatcatacaccgctccttcctatttcgcaagtttctgtatcaattcctgcaaaaaaaagcagaaaatcagacggcgtatgagaacccttcctaaaggttatactacttacaaaaaaggaatgtggctatgaaacataaattcttactatgcggtgctgccggctggtgcatggaaattctctggacaggtattcactctctggaacgcggagagcgcaagctgcttggccagtcctccatctggatgtttcccatttacgggatggctgcggtaatctcccccatttcccgcctgatgaagaatgtctccccgctcatccggggaagcatctataccgtaggaatcttctttacggaatataccacaggcagcatactgaaaaaatatcagatgtgtccctgggattacagcaagtgcaagctgaattacaaaggtctgatccgcctggattatgccccggtatggttttttacagggcttatttttgaaaaaatactttccgattaatgttgaaattaccggtaaactattatatgatggtagatgataaattacccgtaagatcttggtaaaattttaccggtaagcacataggaggtaacccatgagacacttaatgagcccactggatttttccgtggaagaattagacaaactcctggatctggccaacgatattgagcacaatccagaaaaatatgcccatgtctgcgaaggaaaaagaatcgcaactctgttctatgagccaagcaccagaacccgtttaagttttgaggctgccatgatgaacctgggaggaaaggttcttggattctccaacgcaggctccagttccgccgcaaaaggcgaaagtgtagcggataccatccgcatggcatcctgctatgcagatatctgcgctatgcgccatccaaaggaaggtgcacctctggttgcatctatggcttcttctattcctgtaattaacgcaggggacggaggccatcagcatccgacacaaacccttaccgatctgctcaccatccgatctctgaaagggcgtctggacaatctaaccatcggcctctgcggagatctgaagttcggccgaacggttcattctcttatagaagctttggtgcgctatcacggcgtacggttcgttttaatttcccctgaagagttaagggttcctgattatatccgggaggatgtcctcagagccaacggcaatgaattcaaagaagtagtacgcctggaagatgcccttccggagctggatctgctctacatgacaagagtgcagaaagaacgtttctttaacgaagaagattatgtccgcatgaaagatttttatattctggacaaggcaaagatggagctggctggccccgatatgctggttctccacccactcccgagagtaaatgaaatctccgtagaagtggacagcgatccccgtgctgtttacttcaaacaggttcaatacggcgtctatgtacgtatggcactgattctcacattattggaggtggatgtatgttaaatgttggccagttaaatgaagggtttgtactcgatcacatcaaagcaggaaacagcatgactatttatcacgatctgcgattggataagctggattgctgcgttgctattatcaagaatgccaaaagcaacaaaatggggagaaaagatatcatcaaagttgagtgtcccattgatgaattggatttggatattcttgggtttattgaccacaacattacagtaaacattataaaagacgctaaaatcgttgcgaagaaagagctgacgctcccggaaaaaatcgtcaacgtaattaagtgtaagaacccgaggtgtattacctccattgagcagggcctggatcacgtatttgtactcacagaccctaaaaaggaaatttaccgctgcaaatactgcgaagaaaaatattccggaaaccggattcgctaagcaccggattcccaagacagaagaaaaccaggcaaagcacatgcctggttttcttctgtcttcaaatacatacatacccaacgggcgtatacggccttcgccgtactgtagcgcataagcaaaacgataagccgggttatgtcgtgaataatcatctatctagacctgctgttgccagcaggttccagcgacccacctaaaagcgtgacgggcagccacattgctttttgttcggtcttgcttcggatggggtttacatatgcccctcctgttaccaggaaggcggtagtctcttacactgcccttccacccttaccagtttcctggcggtacatttctgttgcactatccttagagttgcctccaccggacgttatccggcatcctgccctgcgaagcccggactttcctcatctgacgcctttcggcctgccagctgcgattatttgttctacttatgcctgagatatcatagcacataaattcttataattcaaggtccggttatatatttgccggtaagaaggatctcacggaactggccggcacacctcccggcctctcccaggacagtctcaattccctctctgctctggtaccaggtatctctggaaatcccctgtacctccacggggcacagataaaattctgcctccggataaaggagctggtaatacattctgcacctcctggcatgaaaagacttgcagcagataatccccttctggatggttaaccccgcatggtctgtcacctgcctggaatatatggcattttcgtaggtataagtggctgcttcctccctcaaaatgatctcccggggcactccatgagaggtgagtacatggcagaggaattcccattcggttttataattatcccggtaaacattctctttgtcttttacgcctgcaaagcttccctgaagaatgctgtgccttcccgagggcagtatccacggggcatacccctgcttccaaagcccggctgcccgctccgccatctgggggtagccgtccccggggataaagatgatatcggcactggatggtgtatcctcagcaaaaataaaatccgtaatgttatccagaaattttttatttatctccatacctaaacctctccagcagcctttcactgtcttcataataggctttgagatctttctctttgctccacagggattcgtctatattcctaagggatatgttcagatttctcagggaatccccatccttcatctctgtgaaggcggaacactcccccattttaaccggtgtgccgtcttccacggcaaacaagccctgcttcttatacatctcatagacctcatcagtataaatcaggagcatactggttcctgtctgggcatccacgataaatttctgctggtttgccatggtgatctgcgggttgctgctctccccgttcttattcccaatggcatagttctgaatcagtacatgaacctttttgtcattgtttctgtcagaagcaatgttttcaaggactgattgcagttcatctaaagcttcctgaggtattccctccgcagtgacaactgcaacagtatagtcataatctatctgtttcagcttatctctcacgaatacggcaatcactgcgattacaaaaacaccgatgattacatgaaacttatggtaataccagaagttctcccaatttttcctgcatacttctttttttttgtcttccatcttgtctgtcatctctcctgtatattttgcagcacccggtctgccctcagatttcctccagtccctctttgtccagaaggcggatacttcctctttctgctttcacatacccttcatttgcaaaataccgaagcattctggagactacttctctggcgcttcccagatggtttgcaatctgttcatgggtgatggttaaaacatcggattcttccagctctccctcctccaggagaaaatgagccagccttttatcaaagctggtaaatacgatttcttccagcacccacatcacatcggacattctggaggacagcagttcattggtataccttgcaactgccaattcactgttcgtaatttcattataacactgggccggtatccttatcgcccttacctctgtctccgcggagacaaagacatcaaaactaatatttttcataatacaggaggccgaaaaaatacagatgtcccggctcagaaggcgaaacagcgtgacctcctttccctgctccgtcacaatgtaagcccggactctcccttcaagaaccagaaacagcccggaacactcctccccccctgcatgcattgcagttcctgggggaaaagtgacgggctctgaattatttattaaggtttcctgtgaatgactgctgatggatttccagaaaggcagcagctcctgaaaatccttttgtaattctttttgcttcatgacattaacctcccagggaccgaggatataccgatcacctcactcttgtatcctccatcatatcaacctgagcaattcttgtcaattatctgcccaccattcggcgaatatcattctctgagcgggcgcctacacttcttgtgatttctttgccgttttccattaccaccagagtgggaatactcataactccaaactgggaagccagagcaccctcttcgtctacattgatcttaccgatttttacatcctgcagctctccctccagattctgaagcaccggagccagcatcttgcaggggccacaccagtcagcatagaaatccagcaataccttcctgtcactgtgcattacttctgtatcaaaattattggttgttatcttcataatgattacctccttgtttatcttatggctgtattctatcattcttttttccctttttctgtgagtaagtcacattccggaattccgccatttctctagacacagaggctcgtaatcacccggtctgcaaagcaatttaccgggttatgaggctgttcgcaatcattcctgccagtatcagaaagattcccccaaatcccattcctgagggaagagagtctcccagcagcaagatcccccccagaagtgtaaagattacctctgcggactgggtcgcctccaccagtgccagccgtcgtggattctgcttcaccatatctgtagccttaaaaaacaggtaggttgccgtcaccccggaaaaaagcgctaccagaaaagactgggcatgctgtcccatatccggcagtcccgcccggctccaggcaaatacagaacctgccagccaaaagggcatactgcacagagtcatgccgaacactctctgcattgccgtaatttccgggggacagtgagacatcatcttacggttccccagaggatacgcaaacgccgccaccagaatcggcagaaccgtcatccgtacatcactcacagccgcttctctcaggtgggagccctgcatgaggaatatccctgccaaaatcaacagggagaaggccagattctttaccggaatcttatggccgaacaaaggggtgagaagcacccccgcgactatggtaatctgccaggtagaagcaatcagccaggactccccgtaggccgatgccagagacaggggtgcataaaagagtccgaaccccacggtgctccacagaatccagacccagggctgctttttaatctcctcccaaattccattcagctgacggttcctccacaaaatcaccagcagtataggcattgtataaaagtagcgaagactcgcgctccacatccagtatccaccgcccagattcatacttcggttaagtataaaagtaaacgcaaaaaagaaagaaccagcgattccataaatcagcgattttttcatttctctatccccccctctataataaaacaggagaaaagacctgtccgttccggtcctctctccattctgtctgactattatctttatcttatttctgcattcctttttttacaataggatataactccacagcaagcaaagcaaatactgcaatgtaaacgactgtaaacatcttgtaacacctctttttctctgaactatatttattatatcctttatgcctgcagaaatccattcggataatcactaaacttctccggtaaaagcatctgatttccgctattatatacaaaaatatttaggtaatgcaaaattatttttatttttacttcaaatcagaaatatcgcctcaatttcctatcaggtcactctcttcagctctcgtaccttatgtttcgtctcagggtctacctggagggattctgttatcttctgcagtgccctgcggtaggtaaagtcgtccagccggcagcgcttcaggtattccatagtctgtgcgggatacgccgcaaagtacatggatacggcccaggccaccgccatttttacataataatcttcgtgccggatgtcatcaaatgccgtgaatgcggcatccatatacgactcctccctataatacataagcagcatgaccacagcaaaccggatctcataagttccatttccataaaggtatggctggaggaagtcccacatcttttccggctcttctcttgccgccttcagccctgcacagaagctgtcgcacacggaccagttatctatcttgggaacaaatctttgaatttgccagcttcgctgttcaaacccggttttacagcatccaattaccattccctgaagcataatctcctcataggattcgtctgaggcattggagagatagctctcccagtccccctttgcaattctcttggcaatctttctcaatttgggcaggcggacacccagaacgttatctacccccggcatgagtctgctggtaaagtcccggaaacccggttccgccagttcctccagctctctacgcagtgactcgtgaaactccctgttctctttttccatactcctacgtctcctctttcagcagaccggcaatctcttccgaagacatggctgcaactgagacaccgtgctctgatatgatctgatctgacagcagtttcttatcctcctgcaattttaatattttctcctccaccgtatcttttgcaatcagtttaaacaccgtcaccgtctcctcctgtccgatcctgtgtgtccggtctgtggcctgattctgtgcggcaatattccaccaggggtcaaagtgaatcacaatgctggccgctgtcagattcagtcccgttccccctgccttcagagagattaaaaataccggaaccgcatccttattaaatgcttttaccagctctgccctgtcctcctttttcgtggatcccgtcaggatatgatacgatatccttttctttttcagacgctttttcagaatatccagcatcgtggtaaactgagagaatatcagtaccttatgtcccccctctatggcattgtccacaagttccatgcaggtatccaccttcgcagactcccctttatagtcctcgtataccaggccgggatcgcagcaaatctggcgcagcctggtgagttgggcaagcacctgaaacttttctccctggctcccggtcccagacggctgttccagctgtgacagcagcttctgtacatttgccgcgtagactctttcctgctctccctgaagacgggagtagaccacattttcaatcttatccggaagctccttcagaacatccttcttcaggcgccgcatcacaaagggttttatcattttctgcaggcggcgggccgcaattttgtcactgtgctgtacaatgggtatctcatattccttctggaacccggaatattttcccaaaattcccggcatcagatagtcaaaaatactccaaagctcactgaggcggttctctatgggggtccctgtaagtgcaaattttactccggctctcacactttttgccgcccttgccgcctgggtcatatgatttttaatatactgtgcctcatccagcacttcacagtaaaattccaggccgcggtaatcctccacatccctttttaaaatgtcataggaggtaatcagaatctggaattcactgtaatgatcataaatctcttttctctcttcccggttacccaccagcaccttttttctaagctgaggggcaaagcggtccagctctccttcccagttgtacaccaatgaggccgggcatacaataagggacggcgcccccgccgcatccccttctttttcgtacctggcacagagaaatgcaatcatctgtatggttttgccgagccccatatcatctgccaggatccctccgaatcccatagcctccagggtacagagccagcggtatcccgccttctggtaattccggagcgtccctttcaggtggtccggtacctcaaagtcactgtcatccgcggacttcatatttcggatcatggatttaaaggactggcttctctgaatctcaatgccttccttcgcctccctgaacacctggtccagataaaatgcccggaatctgggtatcctgcagcttcctgcttccagatccctgccgtcaagggaaagcccctccataatctcagccagagcgctcacagagttatcctccaggcgcagaaagtctccgtccttcagcctgtaatacttcttcctctggcggtagctctgaagcagcccctccaattccccaaacggaagcttttcggaggagagggtaagatctaaaagatccccgctcagagtaatgcctaccgtaaccctgggagctctgcggacagacagctttttcagattttcagatacaaatacttctcccgtctgccgcagctgatccatccctgtggcaagaagctggtagactctgtcgtcctggtttaccgggagggtaagaaccttcttgtccccggtattatcaaaatatgcccttgcggtatagacggcccggctctctctggcaatgtccctgtacatgtcttccacagaaaaagcccccagcatattaaagctcttgtccccatattctgactccaggcggcaggtaagcttctccctttccagatccagatagatgcgtatctgcacctcttcaggcatataggcaccgatatccccttgtagtttcacctctgcatgctccctgagcaccggatatatggtactgcagaatgcgttcatatctttcacagcgatttccagatgggcacattccctccagttcccatactgacacacctctttcatatccctggcaaagtcttccgagcagcagtacacagcttcccccatccgtacaaacagagattcatctgaggagaatacctcaagccggggaagtaccataaagcacccgtcatcccgggcggtaatttcaatcacaagagggggattgccctcaacaacagacagttcgctgctgccctcagcgctgtccaaaaggcggcatctctttcctctcatcaggagaaaaaactctgccgcctctctttctgtgagattcagttcctggggattactcctgtatctctccccggaatagtaataggtttccgttctaagttcctctctgtctttatacgcccgctccaaaaaggaaataaattcccgtgcctgaggggtaaaggcacttctctcatgtataaaggacagcttttttccgtatgttaccttttccccattttccactgcttcaagaaagtctccgatatttttcagggcatatttataatccataccgatgcgcaatgtcagcttccacgtctgggaatacttcttcagcgccggttccagctcaacctttcctgccacagacggctgaaaaaacctggccttttctctcatagaataccggtaaattaagcttgtaatctccggagacgacacccttgtcccggaaccggcgggcagttcctccggcgcctgtccgatgatatccttttgcttctgctcctgaagaatagattccctccaatagtgcagggcagcggcgacgcaatgactgcacattcctttgtgaatcaggctgtcttcacattcacagctgtaatctgtgatcttgtcattggcctcgtccacggtaagctctaccatgtatagctcctcatctttgcccagaacctctgccttaactgtagagaccccctccccctcccattcacaggaacggcaggtgatcacctgttgattcgtatagagggtatttccccttgtgtaagaggcagggtaagattcctgccggatcgcctttaacgtaattgccatgctcactcttcctttcagcagatgcggatacagactgcatacctctattatactgatttccgccgaaaacacaatgtaaaaggggtgctgtcactgcctatggttttattttggtctcccgaatcttttttctgagtcccagaatctcggagggagatacggataattcatcaactcccatagcgagaaaggtctccgtcagttccagatctgaggcaagctctccgcagattccagcccagattccatgtttgtgagcactctccactgtcatctgaatcatccgcagcaccccagggtgatgggcgtcataatatctgtccagtttggcgttcccgcggtctatggccagtgtatactgcgtgagatcgttagtacctatgctgaaaaagtcaaccttttttgccagttcatcgcttaccataactgctgcgggggtctcaatcattatccccagctctgcctcccccatggcaattccttcctccctcagctctttttttacctcttccacaatctcaaggatctcatccacctcctttacagaaatgatcatggggaacataatggaaagattgccaaaagctgaggcccggtatagtgcccgcagctgcgttttaaaaatatctttcctctccagacagattcggatggcccggcagcccatagcgggattctcctctttctccatatggaaatagtcaacctgcttgtccgctccaatatccagggtacggataatcacctttttgccccccatattttccagggcggccttatatgcggcaaactgctcatcctctgttggacagtcctccttctccagatagaggaattcacttctgaaaagaccaatccccgacgcatcattcttcagtacaccggcaatgtcagagacacttccgatattagcatacagctttatctttttcccatccagggtaaccgtttcctttcccttcagttcctggaggagttcttttttctgccgttcttcttccaggcgctttttcatttcctccagcacctccaaagtgggttccagatatacgattccccgaaatccgtccacaaccgcttcttttccgtccagattttgttccagatcgattccagtattgataatagcgggaatattcatggttctggccagaatcgccgtatgtgaattgacagagcctcggcgggtgacaaaagcaagcaccttgtctttgtccagctgtacggtttcacttggtgccagatcatctgccaccacaatcactggttccgtaaagtccctgtcccggcttccctttccgctgagatttcggatcacccgctctgagatatcctttacatccgctgccctctccttcatatacgcatcatcaatggcggcaaacatattcgcaaaatgatctccggcagttcccactgcgtactccgcattcaccttctgagtctgaatcatatgcaggatagaagcctggtaatccccatcatccagcatcatctggtgcgccttaaagatcatggcgccggcctcccccacttccctcagcgccctctcatacagcttctgaagctggtcagcggtctcttcctttgccttccggaaacgatcgatttccctttccggctcttcgatgggccttcttctaacctgctgttcttcttttttataaactgctattttccccacagcaatggctgcgaatgcactttttcctctgattatttccataaggtactcccttccggccggcggtgctgcacttccttctcaaggattgcgctcagcctttctttgctcagcatagtaatcctccctttttccttcccgatttattttgactatttttgattgttttactttgttatgataatattaccgccattttctttcattgtaaatcatttccagtcacgccgccctccaaaaagcggatgcagcatttaacaccgttctgcaaaagggcagcaaaaaaagcggatattaccgcagtatcagctgcaatatccgccttgctgtttttgattgttattgccggttttatctgtagtgaacaccgttccagtaaacatggtccttaacaatagtctcagggagcagtcttacgccctccaacgcccattttttgtattcggtaaagcctacccggtcgataatatagcctacatgctcctttccgccgggtgcattgggatcaatgtattctttcacaaaccgataggtattcaggattactttaatgatcgtatcttcatccacccacaccaggaagtcctccccaagtctgggattcctttttcctgttctgcccatgatggtaagacgatagtatttctgtctgcttctggtaaatgccctggtgggacatttggtaatgcacaccccgcagcccacacatttctcttcattgcgcaccaccttatagttttcccggcgaagagcgttcaccgaaagctgatcgcaccctttttcacaggccccgcagttcacacagcggctgggatcgtactggggcatagtcatgccgatgattccgaaatcatgcatccttgctttaatacagtcattggggcagccggtcaaggctatcttaaaatgaagatcattaggaaagatggcatcctctatgcgctttgcaaatgccgccgtattataatttccaaagggacagacacggtttccgatacaggcagaaacatttcttgttccggaagccggataaccggtgccgggtatctcctggttgatacccagattttcaatcacgggctgcagcatttcatttactttatccatatcctccagggagattccttcaatctcaaacccctgtctggtagtcagatgtacacttccgtttccataggtctctgcaatatccttgaccacgcctaatacctctgcgctgcattttcctcccggaacccgcactctggaagctgtgatccctctttcttttgaaatacggaaggcattcttttttacctttttcgtattgatatccatacagtctgcctcctaatcgaataatttctttccctttgcatagttaaataccggtccgtccagacagatatatgtgtcatccatcttgcagtggccgcattttccaagtccgcagcacatttttctctcctgtgagatccaaatctgctcttcctttaatccccgtttcagcaattctgccactgaaaatttcatcattacaggaggtcctaccacaattgccgctgcgtcctttagattctctatgggaatcttcggaatatatgcggtcacaagccccgtcttccagcccggttcatctgcctgatctaccgtgaccgtaagattcatctgcttttcccaccgcttcatgctgtccttgaacagaatgtccccgggggatttaaaaccagcaatgacagagagacttttcacctcttccctgtgctcaccgaaatagtctattaccccttttaccggtgaaaccccggtgcctccggccacgattatcagctctttcccccggtagagctccagagagaagccgttgccgtagggtcctctcataaacaggctctggcccacacggttttcgaatatttcattcgttaccttacccaccttacggatggtaagctctacgtcgtcttccccaattccgctcactgagataggcgcctccccgaacttgggaatggaaacctggaaaaactgtcccggctgtacgtctcccacataagacatacggaagctgtattcaatctccgtatgtttctgtacatctttaatctgagataaaaaagggatatattcattactcattatcctgtccctcctttgccgcccggcctaatttctgaagacaggccagataagagatatattccggacatgcatcctcgcagcggccgcagcccacacacatgtgatatccgaatcttttcttatagtcatataccttatgtaacaccttgaagcgcattctctgcccctgatcctgccggaagctgatatttcccgctatatctgtatagccgtccacctggcaggaagcccatactctgcgtctctctcccgtccggtcattgtccttataaaaaatatcctgcatggtaaaacaggtacaggtaggacagacaaaattacagcgtccgcagccaatacacctgccggtatactctttccacatatcatgattctggatccctgcgggcaattcttccggaatttcggtctgaaccggattcttcgtcacatattctacgggtatttccgtttcttctccctgaaatgctttcaggattctgcccagctcctcatctctgcagtccaggtaaaccccctgtccatccatcctcagataggcatcgtagtctgtacttttattggttcccatagatacacagatgcaggagtcaaaggattccgggcatcccatcaggataaacctggtattctcccgtatccttttataataataatcctccgcgccatttttcaaatagatctcatccaggcgcctgacactgtgaagatcacagctccttacaagtatcagatttcctttctcctcctcttttggaaccttcatctcatcttctgtgaaataaagaattgtctgagagatgggaagcagcacctctttaaagctgtagtctgactttttatcccatacaatctcgtcccacccctgaatctctccgtaccggatgctgtctgtgtctgagaagcacccttccataggaaatacctttggggcataaacccggtaggtttcccgcagccgctctaaaaatgcgtctgctgtctctctctgcaataacgtacccattgtttccatcctttctgaatatcagccatctctgcctgtatctgtgagcctggattaggccttataaaatccggccagtgcctcaggatccggaatccagaaatgtttgtttttataaacaatcaaatcctggctgctgaggtttttacatgctcttgagacattttccctgggtgcccccaccagatccgccatcagattcatagtcatctctatgtcgaccttcacaccagcaggagtctgcacaccgaaatctctgcccagcttccacagcttagctgcaatcttccgctccagatacatattgcctgtggtatttttcagctgatggctcagcctccagatgtaccgctcatattctctcataaccgcgcacatccaggcaggttcctgttccatcaatttaacaaacagggtctgagggattttcagcaccgtcagcccacttgccgcctcacagaagactgacgcctgggttttgcttatgatattgtagttgagaagactgccctttcccagaatgaaaatgactttgcggttgccgtgcttagtaatattatagactacagcctcgccggccagcacaatatagacaaatcccaccgtttcctttgcacggtatatcatttcccttttttcatagtcaaccatctgtgcctggttcagaattgtctgaatcaaactatccggaacctcctggaaaatctttagcttctttacttcatttcttacaacatctctcatacggtacactctaactaccctttcctgtcccgcttcttacatcagtaattataacggatccaatgcttatgttcggtgacgtttatcacattttccctactttttcttttttcttacaggaatcccagatgttccagaagaatctttcctccgatgagtatcaatatgactccgccggccagctctgcttttgctttatacctggtcccgaaaatatttccgactttcacaccaaccgccgagagggcaaatgtcacaatgcctatgaaggaaattgcccggataatgtgcacctcaaggaatgcaaaggtaatgcctaccgccagagcgtcaacgctggtagccactgccaaaagaaacattgtttttacatccagggatgcatctgtatcaccgcactctgtacattccccggacagggcttccctaaccatattcccaccgattaaggccagaagtacaaatgcaatccagtgatccacggcagtgatcttttccttaaactgcactcccagcacatatcccagcaaaggcatcagagcctgaaatcccccgaaccagagtccaacgattccggctctctttaccgtaatcttctgcatagccagccccttacagacggacaccgcaaaggcatccatagacaatcccactgccagcaaaaacaattccattattcccatattccatcctcctgtattatcctagtgtgccgccactgccattttcagcttttgcatgatattcacacacgaaggggcagattttgcagcagcgcgcatccagcccggagagcttttctgtgtaataaaaaaagacgcatgtacagtgggcaccatacatgagtctcattaattaagataagccaggccgtcacggccagtatgttgacttaccacgtatccacgccaattactccctcacgaattgataacattttatcatcaagcggcagggatttcaagaaatatttacctgcttttccaaacttacttgaccagcccccgccttcagatggtatgatataagtaagtaagtaactaaatgcattggtaaaaaggagagattccctatgacgataacagaagtaagcaaaaaattcggtctgtcagcagacacccttcgctattatgaacggatcggactgatcccccctgttccaaggactaaaagcggcatccgggattatggagaagaatcctgcgcctggatcgagcttatgaagtgcatgcgaaagtctggggttcagattgacgccctgattgaatacgtaagtctttttcagcagggagattccacgctggaagcaagaaagacattgttagcggaacagagggaccagcttctggtgcgtatgaatgatatgcaggcctccctggatcggctgaatcagaaaatcgagcattatgagcaggggctgatgcgtgtggaaaagaaacttctggatatgaaagcagcgaggaacggagaagaagctgtaggatagatcaacatactgaaaacacctgaggcccacaggcaaatctgctgcctgcgggcctcagcccctgttacgttgtaattaaagtactgtatccatccctgcgcagtctctgctccatcttgatggcattatccagctgtctgaaggcacctacctgcaccttatagtatccgtcctcatccagcataaacgcaggatagcctttatccagcaattcgtacagcagattatctgcattgctctttacccggaaaagacctacctgtacccggtacagggaaggttcctccacggtctcctcatctaaggttcccataatagctgcagcaattgcctgtgctatctcatcaaactgtgcatcgaacctctgattgtcttcgtctgtattgataaatcctgtctcaatgagcaccgcaggcatctttgttcttctcaaaaccacaagccccggtctggccgtcacccccagctcattgaatcccagttctccaagagcgccgttgatattctctgccatatccagcttttctcctgatttatcgtataccagcgtctccactccggaatactggttggaccggggactggaattacggtgaaatgaaataaaaaaatcagctccggactcatttgctatcgtagctttttcaaagggtgtctgatacacatctgtggttctggtatatactacatctactccgttatcttccagaatctggcctaccgcaagtgccaggcgaagattatcgtccttttcctgccgtccctgataaaccgcacccggatccgtgcctccgtgtccggcatcgattactatcttatatgccaattttagactccttgcattgctttataattagtgtatgcagactgctggaatccgggcacataagatttacatagtctccgcccggtcgtctacgcttttcttaaaattaatcacttcatggtcatattcttccgccatatatctggaattcagcataaaatcagccgtagccttattaatggccatagggatatcatagacctgggcaatcctcatcagggccttcacatcaggatcgtggggctgggcagtcagcggatctgagaaaaataccacaaaatcaataactccttctacaatcttcgctccaatctgctggtcaccgcccaggggaccgctgttatatcccttcacagacaagcccgctttatcggtaatcatcctcgccgttgtgccggttccgtagagagaatgctcttttaatatctcataattatctttacaccattggattaattttggtttttcattatcatgggcaatcaatgcaatattttttttcttacgaatggtaaatgtcacaaaatcttcgttcatgcttttctcctctttcttaggcttttgtatttcctttttcatagtatcacactttccggcaaatgcaaattcatttttccttgttctgtatgcatcaaactgctacaataggaataggataaggagaactattatgtactattttataatcaatccccgctcacgctccgggtatggtgcggtaatttgggataggatccagcaggagcttgatccccgggggattccctatgaagcttattttacgctatataaaaaacacgctgcccgcctggcccatgaactggaagacaggcaccacacatgcaccgtcatcgtcgttggaggggacggaactgtcaatgaagttctgaacggtttttcccaccctgcccgcattaccttaggttacatacctaccggctcagggaacgactttgcccggggaatgggcatccccttcgatcccggggaggcgctttctctcatactttcttcccacaccattgcaaggatggacatcggtaccctgaaaacccgttatcacaccagatgctttggcgtcagtgcaggaatcggctttgatgcagccatctgccatgaggcactttcctcccccatcaaggacacattgaatcacctgggactgggcaagctcacctacgtggggatagcccttcggcagcttcttttattcaagccctgtcaggcccgcatatgcctggataaaaagcggacactgcatttccccagactttattttgccgcagtcatgaaccaaaaatacgaaggcggaggatttcagtttgcccccggagcgaaaaacaatgacggaaagcttcatatctgtgttgcgggagatctgagcaaacccaaaattcttctgatgctccccacagctttttggggaaagcatatccatctgagagggatacatatgttttcctgcaggcagatagatattcatacagatcgccccctcccggtacacagtgacggggaatcctgcggttatgcagattccatttccctgtccatatccagggaacagatttctgtcattaccccaggctgagtctccacccatgatacggcattatgacagagagaaaggtctgaataatcatgaaaatactgacatgcttactaatcctgttccttctttacatattctgtattcttccaaggtttacccaccgaagagagagcagaagcttccgccatattctgtttgcccacagagggctgttttccaatgaaaacggaattccggagaattctcttcctgcgttttcccgggcggtaagcaaaggctatggaattgaactggatgtgcagctcaccaaggaccagcaactggtagtcttccacgacagcacactgagccgcatgtgcggtctggatatccatgtaagagagaaaacttatgagcagctaaaagagcttactctgctgcataccaaagaacagattcctttgttctcccaggttctgaagctggtggacggacaggtgccgctcctgatagagattaagctgccctgtttcagcacctctacctgtgcgcttgtagatcaagcgatggccggctacaaaggcagctactgcattgaatcctttaattccctggctcttttctggtatcggctgcaccgtccggatgttgtgagaggacagctgtccagcaacctcacaaaaccggtggcagagggcggatacctgttaagcttcctggtcaagaatctgctcaccaacgtgctgagccgcccggactttatttcttactgctataaagacactaaaaatataagcttttgcatcctgcgccgcctgctggggactatgaccatggtgtggactatacgatctcagaaggtatatgagcgctgcctgaaccggtacgattccctgatctttgacagcttcatacccaattcataattcaagtacgcctcggcgtacttgctgtgagccgccggaggctttatcttggaaggagattggactcccaccaaaacaattttgttatttactcaccacctatagcggtgggagtcttatctgcttacaagataaatagccagtttgtgaacgttttcttaaatataaatgaactgcattgttatcctcagatccctgtgctataatgcagttgattaaaaatattcaccaataaattaaagaggtgacccctttgaatatcattaaaaaatacaaacacgcttggataattcctgttttcggcatactatacatgatgggatttacgtacctggagcagcggaataatgtacgttttcatattatccatatgaaaattgatgatgtaattcccttttgcgaatactttattgtaccatacttcttatggtttgccttcatagcggcaaccgtattttattttacctttatcaacaagaataaagccgattattacaggctcatcacaacccttggaatcggcatgacactgtttctggtaatctcttatgtctaccccaatgcccaggatctccggcctgtagtattcgcccgggataatctctttgtggatatggtgaagcatctttaccggatagatacgccgactaatatactgcccagcatccatgtttttaattctgtggcggcatgtacggccatattcaaatgcgaagggctgaaaaaacacagagcggtcagaggcggcactctggttctcacagtgctgattgtactggcaaccgtgtttttgaaacagcatacgcttttggatgttattacggcctttgccttatattttatctgctatcaggtaatatacaagcccagaacggctccccagaaagccaaagctgcagaagctgcagccaaatgaaactgtaaaaggttccttccgattatcggcaggaacctttttattagttaaatccataaaacttctgtaccattcggtaaacggcaaccgatacttcccggccgctcttgcccggaagattgacgcaccgccccagcagtccgaaccgtagtctgcggtagagatgggcatctgccgtcttcaaatatttccagagttctttcttcttttcaaagttttcatcagtcccggatcggatcagcataatagatgaaaccgccgtgataatatccaggtagttcagcatatattgacgcattcttttattgtcgagacgtttcaatgcaatagattctatcataagcttatttacttttatctgctgatcaattcttcggatcatcacgtcttcatggacagactgatcttccctccctataaaataacggtaaaaattaacgttaagataatacattgtccttacactgggcagcggctggtatacaaacagattatctacataaaatgtatgcatgggaagctccagtccgcactcccgaagcagctttgttcggtaaatcaccgaatgcatcaaaatgtacttgcctgtccccatatgtctcatatcctcccaagtgaagatacggtcctggggcagatacttggtgtacttcatcaccttcttcctcttggcaccctgcttttcatatacaaaattactgatcagcatgtccagagtataaggtcccccggcaatatccttgatggtgtcaaggatcttttgatatgcctccagattcacccagtcgtcgctgtccacgaccttgaaatacaatccggtagcattcttaattcccgtattgactgcagcgccgtgtcctccattttcctgatgtaccgtctttacaatgtccggatatttctctgcgtattcatctgcgatcccggcagtactgtctgcagatccatcatctacgattatgatctctacctgctctcctcccggcagcagggaatcaatgcacttgcgcatataagcttctgaattgtagcacggaaccgctattgatagtaatttcatctatatatcctcctcaagatattttctgtaagctgcaaaggcagccgggatggggtactttccctttgtctctcttttgttcacaaaaaggagaccatctgcatttctcttttccctgggctctatcagtacccggtacccctccatctcccactccacatgagagaatatatgctttgcctgtgacagcggctggatgcgcacaggctgacaggacagtcccctgacatactccagaacctcttcctggctcttgtaaccttccagattggggaattcgtacataccggccagcaggccttttttctcccgcttgcgtatggcaaagtcttccccgtcctgtataagcaggacagtcctcttctccagccttctttgtttcttttccgcttttttcggcagctccatgaccctgtcatgctttctcgcgagacacagctctgccagaggacattctccgcatttggccataccgttgggaatgcatatgagggcccccagctccatcagactctggttaaaatctcccggggtatccttcggcataatctctgccagttccctctctgtcttagtctttaccgattgccttaaaatatcctcttcattttccgtaattcttgcaattacccgcagaacattgccgtctacggcaggtcttgagacgccgaaagcgatagacgccacggcacctgccgtatagcttccgattccgggaagccccaaaagcttttcgtaatccgggggaagcgctcccccgtaatgctccaccactaccctggctgccttctgcatgtttctcactctgttatagtagcccagaccttcccaaagcttcaacagacgggtttccggacaggcggccagatcttcaatctccgggagtgcctccaaaaatctatgataatatcctttcactgcctccactctggtctgttgcagcataatctccgacagccatacatggtaagccgaaggctccttcctccagggcaggtccctcctgttctcataaaaccagccaagcagcggctgtacaatctctctcggtatcattcttttgcctttctattccggtctctccagggatacaggcacagcatccataatctcaattctgtctgcttccaccagacagtcataagccagaatatggactccctgatcccgggcttttatcagcgcttctccaaactccgggtgcgtatcccagttaggcatcatcttccttactcccttcatctgaatcacaaagagcagataagcctcgtaccctgcctgtacgcactctcctaactctaacacatgcttcacgccccgtaaagtaggtgcgtcgggaaatttggcagttttctcatcctccaaagtaacaccttttacctccagaaaagctttccttcctctgtcctccacataaaaatcaaacctggaattgccgtattttgtctccgggcgtatgagggcactgccggaaaagaggttccctttggcaagccactctcccgctgccttgttgggaacctgagaatccatattaatcagaaggttccccttttctacacctatcacatcaaattttgttttccggttgggattgctgctcttttccaggtaaactttaactccgggaatcagaagctctttgcatctgcctgtattcttcacatggcagatctcctcttttccctcagtgatcacatgggcgataaaccggttgggacgtcttataaaaatcccttcctgtacactgctgtatctcatattatacctcttatctaatatttcttgcttttttatatgagtttctttacaatattctcatgcgccggcgttctgctgtatctgcatacaggccgtccggtcacaggacttattatactacaaaggagaactattatgaaaccaatagatagtattatttttgatgtggacggaaccctgtgggattccactcatttggtagcggaagcatggaaccagattctgatccgggaggaggtatccattccccgtctcacagcggagactctcaaatctttgtttggccgtacgcttccggatattgccagggctatctttcccaatgaatgtcccgcccggcagctggaactaatacatctgtgctgtgagagagaacatgaggtactgctccaggctcaggttcctctgtatcctgatctggaacatacgcttcagcagctgtcagcggtctatcccctgtacattgtcagcaactgccaggggggatatatagaagtatttcttgagaataccggttttgggcactactttcaggatcatctctgtccgggggatacaggctgcgccaaggcctctaatatcaaagaaatcatttgccgtcaccgtctgcagtctccagtctatgtaggggatacagacggagaccacagtgcctccagggaagctgggataccctttgtatttgcctcctatggtttcggcaccaccagggatcccgattacagcatttccggtcttagggatctgagccgcttatttctttcctgaatttctctaaaaaaacgcctccaatttcagcaattattacctaagatattaaacaaaattcattgaatcttaatttactttcgtcaaaataaattatataatacttatataaatacagactatttatgttcttcttctacacttttcagaattagccaggcaggcagcggatggtgcgctgtgcccattatggattggaggcgaatggatatgaagaaaaccaggaaatgtattttatctatttttctaactttactgttaacggcaggcagtgtgcctgtcactgcatgggccaaagatgctgcagacgttctggccttcgcaaaggattatatgaaaaacggggccacatttacgtacggtacaggcaaaacaccggaagcgcttgacggaacagccactgccaaagacggaagctccgtcgtctaccagtggtatacttcctcggagggaaaactcacaccgctgaagaatgcttccagtgcagtctatactcccggcactgaaaaagccggaactaccgtctatgttgtggaagccaaacttgcggcgtccccggaaacggcactgaaaagcaaagaaatcaaagtaattgttaaatcagctcccgaaaaaattacggtaacatcccctcctaaaaagaccgaatacaaagaaggggagtcatttgaccctgacggcatggcagtgacagccgtatataaaaaggacagccaggttccctctgaggtgctctccggttccgactataccattgctcccaaaggcaagctgactcctgcagatacggagataaccatttcttatctgggactcacagccgttcagcccataaccgttgtgcgggagcagaagccaaaggaagatccccctcctgttctgactgaactcaggctcacgcctccggaccgtacagaatatgaggaaggggacagccttgatactacgggacttaccgtcacagctgtgtacgacaaaggagaaccaaaggttctctcccccggagaatataccatatcacctaccgataatctgaagccatctgacacactggttaccgtaagctacagccaaatgacagccaacttccctattcgtgtaacacctgcagttacactggagcggatcgaagtgaccaggcagccggataaactttcctacacagagggagagacgtttgacccggcaggtatggaagtctccgccttttttaccgtaggggaaccgaaaatcatcagctatcaggaattgtctatgactcctgaccggcctttgaccgccagtgacacctctgtaaccattacctatcagggaaaatccgcttcactttctgtcaccgtacagccggctgtcaccctcacaggtattgaggtaactcaccagccggataaactgacctatgaggaaggggaactctttgatccctcaggtatggaggtaagtgctgtcttcagtaatcttacaaaaaaagcgctggatacgaaagatgtaggatattcccctgaggtaggcctgacccctcaggatacaaaaatcactctgagctacaagggcaagacagccactctggatatcaaagtactgcctgttctaactatggaaagtatccagattactgctccccctcagaaagtaaattatacagagggtgaaagctttgaccccgcaggaatggaggtatttgcagttttcagtgacaattccagaaaagctttagatactaaagatctgaccttcacgcctgacggcgccttgaagaccactgatacaaaggttattgtctcttacaaaggcaaaactgcagaacagaagattcaggtcctggctgctgtcaccctggagaagattaccattaccacccctccggataaaacaaaatacattgaaggagaaacattcagcacaaagggaatggaagtaaccgctgtcttcagcgattcttccaaactggcaattgacaacaaagacctctccatttctcctgacagagcgctgaaaaccagtgacaaaatgatcactgtaacctataaaggcaaaactgcagagcagaagataagtgtatcagaaaaaacctataagattacagtgaaagacccgtcaaacggaacggtcaccgtttctaagacaactgcaaaagaaggagataagatcacagttactgcaaaggcaaacaaaggatataagttaaaaaatatacttgtgaataaaaaagcgataaaaggcagttcctttaccatgccggcagaagatgtcaccgttactgccacctttgtgaagaccgtctcctcttccaatagctctgacaacaaaacaaaaactttaaaagcagccaaaaccggagataccgcccccatacttatgctgtctttgatggcggccgtatctgccggggcagcagcgctgctgctcaggaaaaggttttttggaatggcttctaaaaaataagtaaaaaatgcgcctcctttcttctaatcctaaaaagggtgatgccgcggtttgttaagccgcggcatcactctttttatcataacatcaactgggtattgccaatatcactgcaaataccaaaaagaaaaggacaattcctatggccgatgttactatcccggcaactgccattcctttccccggcttatccttggcaatggagataattcccagaatcaatcccacaataccaggcagtattccgatgaacagacaggtcagtacaatagaaacgattcccagaaccatagaagctatggccaaaccggttccgcccgtctgctccggcctttcctcgtaaacggacccatagggaggctcatattgagaaatatcactctccggttcataatagccgcttccatccagaatatagtcacagaccggacattttctggtattatcaggaaactgagagccacattggggacatttaattagttccattcttatcctcctaaacactatgtattctaatgataactgcgccccggtgtttctgttccggggcgtctttgatagatatcctacttaataaaagcagacaatcggcacatccttttcgatattttcgtacagcacctgtgctttgcttcttggcaggttaatgcagccatgagaaccgctggtcttatagatattcccgccgaaattgcttctccaggaagcgtcatgaagtcccactcctccattaaaaggcatccagtacttaaccggtgattcatattcataagttccatcaggattcttctttcctctcagggttttgtctctctgcttatagtagagagaatataccccggagggagttacacggtccttatatgacatatttccggatacaaagtctgagtctacaatcagctgtccgtctttataaaaccacatatgctgatttcccaggtcgacttccacatacgtattgcctatttcattgccctctctggatacggcggttgacgaatagatcggttctcttgtggtgactgtaccggccttaatctcctcgatcagctgtgccacctcttttttctgatttattttccagccataagagccgccctttactgtaatgtctgcatccgctgcggtactgtggaaggagcgttctttccccacagtgtcatatttggcagccagagacttcacatattctttagcatttgccttaaaagtatcttcattttcaattatattaccgttctcgtcataatcgaaccagtcttttataatagaaccgtccagcagttctgtctgttctccgaacgtataggtaatgcttgccttggcataagtattcagcatatctctctgggcaataagatctggattatcctttgtaacggagggtgcggcataggcacctgcctcttcagctgagacatccggtctgctctcagagactgccgtctttactgcctcaaacatcgtattttcgtcaatggttgtgccctgtacctcatccactataacaaactccgtctcctggaaggtaacataggcatcctggggcgcctcctggttctcggctatcatactgtccagggaatccagtttggttctcagctgattctcatcaaaagatatattcttggccgcctcgtatttttccggcttaaaatagcctctaatccacagcagcggattctgctcttttagaatcttttctgcgtctccattggatacatactgataaccaatatcacttcccagaatctcctgagcctggtctcccctgaactgaacagttatcttataatcctctacctgcctgcggatcagatcttctgtctcctccacagtcatattctcacagttaattccgttaatctctgttcctttgaagaacttgtcgtgatagtagtaagcgccgaccccataagctgcaccagccagcaatacaatcacacctgcaacgataccagtcacctttaacgccgtatttttactcttttttttcttcatcttagacttttggccagaggcctttgtagcctttctattcttttttttcttaggctggtcatatacggtatcattgcctatggtgtcctgaacgatcttggccattgcttcgtcaattcgaggatccacggcacctgctgcttctacctgattctcctgtagcttcttttttttcttcgacatctctatttacactcctactctcttcacaataacgctaacattatagcataatttttttctgatagcagaggaaaacaaagatcttaacaaaaattaagatttttgtcacactttgtcaatgaaagaaaaaaagctggaatattcccgccttcttcctttattttaaccaccttttccttataaaataccagatctccagcaatatgatgaaaaggctgagaaaggcgatcagagggtatccatatttccaatgaagctccggcattttatcaaaattcattccataccacccggtgataagggtgagaggcataaagaccgtggtaacaatggtaagaaacgacatgatgcggttctgcctgatgtcaatctgggactggtacatttcccgaatctgcatggtatattctttcaaggcctgagtgttggaatacagcctggacgcccggtcaccgaacagggaaaacagataacagtctttctcatccaaaaatccattgtggttctccaccaaagtctcactcatatctgcaagctgttcgtagtaggaattcagccgcaaaagttctttgcggcattgcagaattgcccggttcacattgtccaatcctttgtccagcagttcctcctccatagtagtaagcttctcctcatacttttggaggaaaaggacatcgtccctaatcatgtattccataaactgaaaaagcaggtgtaccagtgacgtcttttcggaacttttctcttctgctatgctgtccataagtgactgggcaaagccagtgtcatcaataaatagcagccgtttccgatccagataaaagcaaaagccacttttatctcccagcagtgcttcctttctgggaatcaaaaaggttccgaagattgcctgatccagccagtctgctttgcagtaatgaatgtgatgaagatttctctcaaagatcagctcctgggaaaccctctcccgagaatttctgtactcctccagggtcataacctgaaccagaggacagtcctcgggaattttatcgtcttctaaagaatggttcatgtagttttctcctttcccggttccggaagcggaaccgtctgggacatacaaaaataggaagaggtttcagcctcttcctatttttgctgcagtatgtaacggtccagcatcctgtttatggtccggttttttaccgcaattgttttttttagaacaataatactttcttttaatatactgttctcctgctgcagtctctctaactcattctttaatactgcttcattcatccctgaccttcctttcctttgccgactcacgtacttctatatagaaatcattataaagggcagtgtaaggtgccggtagttaagatgtgttaagatttactgcattattcggcataaaacggcattattcaccatatacacggattacggaagagatttttcttatcacagacattccctgaaagattgccagagagtcattaaaatgtctttcttccacagaatctgtgatcaccactatctctgcggcctctgaactttttgctttctgtatgacctgtgcaatactcacagagttgttagccagaacactggccacacttgccagcactcccggcttgtcgtccacctgcatgcgaagaaaatacctgcttcgaatgtccccgatctgtttgatgggcagctctttatagcaggtacagctgattcttccgctgcactgataccggatgtttctggctatatcaaagacatcgcccacaatggcgcttgctgtcggcatctcacctgccccgcttccatagaacatcgtatctcctacggcgtccccgtgaacaaagactgcgttaaatgcatcttttactgaggctaaggggtgagcacttggaatcagcataggatgtacccgcacttcgatcccggtatccgtatttctagcaacccccaaaagctttatatcacagcccatctctcttgcgtatttaatatccttggcagtgattttggctataccctcggtatagacgtcgtcaaaagtaactcttgagttaaaggcaatggaagccataatggcaagctttcggcccgcatcatacccttcaatgtccgcagtgggatcggcttccgcataccccagctcggtggccagagccaatgcttcctcgaattccattccctcttctgtcatcttagtcagaataaaattcgtggtgccgttgatgatgcccataacttccgtaatatgattgcccgccaggcattgtttcagcgggcggataatgggaattcctcccgctaccgccgcttcaaatagcagatcactgtgatgggttcctgccatgtccaacagttctttgccgtctactgctatgaggtctttgtttgctgtcaccacgtgcttccctgctgccagcgcttccatgatataggtgcgggccggttccattcctcccatcacctcaatcacaatagatatatcatcgtcatggacaatgtcttcccagcgatttgtaagtactgcgtcatcctctaccttttttgccgccttctcaagattgcgtaccagaattttttttatttccacctcagctccaagcttagagagcatctcctccctttggttttggagtaccttataaacccccgtgcccacagttcccaggcccagaagagctacctgaattgttttcttttccatacttatatcctcacatccgggatgttccttcccttttataattctttttctgaatactctgatttcagtttttcgttcctcttatgcgcttttgacagaccggcaaccttattgtatacccagaaggaatataccagcactttgttagcctttcccatcttttcctttgttgtcttattataatagcttccacccacttcaaagggagtgtctttcattacacaggcaatcaaatcggattcgctttttactccgtcaggaacctctgtgtaggcttttcccacacactctattttatgggcatcacttcctccaaagcagggctttccgtacttttccgcaagcttcgccgcagacgcattggattcttcggattcgcaggcattgaatgcctcaataaaatcaaatcttcggataatccttgggtctttgtaatatgactttgtgttcgtaatacttagatacttttctccgcagggatgggcaggaccaataatccctccgcaggcatgaacgatagagatcagcagatgtgccggcaggcccctcagttccagaatacgcagtttaattgtctcgggcataatcaccagcatgtgtcctgccccaaacgtatcatactcgattccttttaacacgagaaagtccgtatgcctcttgcccttaatatattttttccaatgacggtaaccgtggtatgaattatggtctgttaccagcatcccgccgaatccttcagatttcagcttttcaatatattcctcgatggggacctttccatcaagggaaccctcttttgtatggcaatgcatgtcaatcttcatgacaagcgctccttcctatcgtgttctatataaatattgtatctaattttagtccgttttaaaagggctttttactataatcctatctgcatattcccgggaacaaggcagctcctttagtttccctgtgacagtttcatcctcccagcagtgcataggatatacccactccacggatacatgcttcataaaccagtcgaaaccatcggcgaaatatctttcctgccttggatctaaaggcaaaaacgccagttctattttcttatcccttaacttctgtatctcactgcggtattgttctctgtatgagcggtttaccttctcaggctctccttcccactgccaatcgttcaggtctccagcgtggtagatgacatggttccccacagtcacaagaaatgcaacaccttcatccgtagactttaatgtctctgcttccagtaccccgaaactttgcttttctcccggccccagaaaaacggtctcatcctttttatccccaggaactctcttcttccagatatcatcggaaagaatgtaggttactttccgtcctttcccagcgggaaggcggaatatctcctcggaaaaatggtccggatgtctgtgacttgcaaaaacaaacagaggtttccgggaatcaagcacaggaatatcccccttaaaatagtcaaacagcaaatatgcttcttccgtctccaccagaaagctgctgtgataaataaaataaacagtcatatctaatcctctaccctttcagaagtctgacagcattgccgctgaacacagcttcctcttcctctggtttcagcttcagtcttctgatgcattctatattttccttttggccgctccacggactgtctgtggcaaacaatatcttatctgtgccatgctctctggcaattctcagaaactggtcgtcaggcataatacccagagaataccctgtatcaaaataaagcttccgacctaccaggtattcctccacctcatcccagcagtcatacccacccatgtgggcgattaccagcttatccggatctaactgtttcagaagattctgaacacgcctgggtgtacagtggatttctccggggagccccacatctctgcctccatgaacgctgatgatcaaacctttttcagcagcccggtctataatcctcagatatttgatatcatctataaacagcttttggtaatcgggatggagttttatgccctttagtcccattgccgcaatatcatcaatctcctgcttataattgcccgtctccggatggatacccccaaaagatatcatgtttggttctcccccgaaaaactcccgggcggtgatctcctcggcaaagcggttcacagactgaaactgccccggccgggtaaccacaggaagaattacagagagatccacatgagcttctctcatggaagccacaagtgaatctctggtaccgtctgtataggccttggcatcagaattcaccgccaatgtatctatggtaggttttgcaattttgtccggaaatatgtgcgtatgaaaatctattatcattgctgccttttactcctgttcaaatctcttcacgaacgccggaatctgctcttttaaaataatgagattaaatccaagaggatttaccacgatccctttgctctgctccataagaatactctggagcttatcaaagttcatcactactccctttagattcttctccctgttaaatttattaaattcacccacatctgtaaataccggctgaaagatctctccattgttattttttacaaagggcacctgtacctctgattttttgcccccctccacttcctcgtcatccttttcattaacccgcatggagacgatataacgggccttcaccaggttggccgccatctcctcttcaagctccggaagattctttttttcctcattgtccacttttctgcgcagctcctgcataaaataaagaccagtaagctgaagctggggattggaaaggggtcttttttcttccggcagctgggaatagtccgggggctgaaccaactccagcaattccagttccacagtttcctcaccctcagtatatacgatggcatttactcccattgtaaacaggctggtataaaaattcaaaaattgatcatttttaaactttacgcccataaggggaatactcttagcagtatattctttggcgaaaacctgtacatccttttcttctctgaatataaatatctgatcgttatacgtctcctcatcgcagacaataaatggcatatttgttgctcttgcatatggtacgtacataacctccatcatctgcagcttctttaacacttggttcttgtccattgtctttccatgatcctttctgataaaagccccactcagcagagtgcggccttctatgtagtattttctctcatcgctcttctattgtatcatcaattccatcttcttgaaaagtattttcttccatttcttcttcccggagcctgcgcctccatccaagccactgaattaaaattcccagaatggcaaacagtactcccagggcgtatcccatccccttttccctggcatgaagaagattgcctatgcaggttcctgccataattcctccctgcaggctggtgctgataataataacgggttccacaaacttcagcgccagagcgccaaccccggctcctgccatcaggcagacaaaaaaactgcccgaagatgtaggatgaatcagcagataacacactgctgtacccatcaaaaagcacagaagaaagattccccaccggtagatacaatatgccagagttgccagcagaatcccccctatcagagcacagatcacagcgattgctatggtattgccaaaatgcatgcccagcatataaccgcctgtcatgccaatgccaaatccaatcatacttacccacatttttagaagacggagtccgaagaagcagtttatcagtcccagcaccgtacatataagcagtgccggtgcggcagcttcatgcacaatttctcccaatcttgctatatattccatgtttatcactcctcaagtcttttcccgcactttgggcagtatacaaaatccttctccgcctcatatccgcagtcagaacatatcctggtccctttggcggcctcattcgtccaccccaaaaagcttccctgtccccgtttgatacgaatcagatcctcttccctcagctctacagcatctccccgcataatctgccggcctatttccggtgtaatctcatataaggtatggcagcaggtagtctcggcatagtaatgcctgtcccatttgaataaaggaataaaaaataaactgaagcaggaatacgtcatatagacttcatatcgcccatattttccgcagctgctgcagataactgttttaacatattcaatattttttcttccctggctgattcccattataaaaaacactggtatacttcccttctgcgcatgattctctgatacctgtccggagagcatacagaaacgggtgccctcgggtatactaaggataccacattttattggcacatgaaaggataaaatcttatccccgcttccttttcaactgaaaagggcgcgttcctctgcgggattgcgccccttcgtcttacctggttttggtccaggctccactggcatttacatagtattttccaatccactggctggacgccatggctccgctgtccttcagataataccaggtattccccagtttcagccaccctgtggccatcgctccgctgtccttcagataataccaggtgttccccagcctcagccaccctgtggccatcgctccgctgtccttcagataataccaggtattccccagtttcagccaccctatggccatcgctccgctgtccttcagatagtaccaggtgttccccagcttcagccaccctgtggccatcgctccgctgtccttcaggtaataccaggtgttccccagcttcagccaccctgtggccatcgctccgctgtccttcaggtaataccaggtgttttcaatgagctgccatcctgtagccatagccccgtttccttttagataataccaggtatttccaagcttcagccaccctgtggccatcaccccgtcatccttcaggtaataccaggtatccagaagcttcagccagcctttggccttctctcctgcttcattgtaataataccagtttccatcttcatagctccaggtatttaacttttcaggttttacctctcccatcaggtttttggcgtttgtcactacctgactgattttttcgaaagaaaccgtggaatcctctgcataagactctcccagacttttccagtttttcattttctgaatcttggccgctgtataatgttctgtatccctgatcgcctcatccagctgtcctagaacctcttccagttctcttttatccacggagatatagctgagtgcatgataattgtccacaccggcatcgctgttataggtatccaggagggtattgtattcttccagtgtaacaggaatcattcccccatggcatcccacatcaccgccggttcttccgtaaccgtcggaaacctttcggatactgtctggctgggaaaggtcatatgtcacatatggctcatagcgcacactgttttttccgtagtagtcgatcatgacacaccattcatcccgatcaaagaacttgaacatggtggctccttcataggcaccggagtacttctccatacctgcctggtcaattttttggaaatggttgcctgcagactcatttctgaaccaattccacactacgtccgccctctgatagtcgttatatcctgccccattcagttcttccagtgtagtaaacagggtgccgtccttttcataaggagtaattcttccgggatcactgctgtcataatccacattgggatccagaacagagtccgcgctcatcagttctatgtggttgtccgtctcatccttgaccacccgatagaccgtaccgtaaggatctccggtctctgtgtctgccacccagagctgggaagtatcaatgttgccatatccgtcattggcattcaccagcttgccccagttcttataaaaagcctcctgctcatacatttttgtaggaccaaatgttacaaaatcgtctgtttcattgcagtaaatacggtttctggaatatccatctgtagcgacacggcaggaccagtatatcaggtaattgtctttctccggattgtatatggcttccggagcccatgcagctcctgcttctatttccgatccaacgtctacccagcgccttgtccagtttacaaaatcctctgtctcatagatgaaaaggctggtactgccatcgtgtgacatagtgccccagtttcctccgtattggggggccatggtattgagatccgttgccagaatccatactttatcagagtcactgccatctgccttagctccccgcagcatatatggatcccggattccctgatcctcaccctcgaaggggaacaagacagaggcatcccctgcagtggtctcttccatgttagtctcctctgccaccgcataatttacattgtctgttttatacaccctgtccgtataatcgctgcctgcaaggaacgctggattacagccgttaagcgctgtccagttcagaccatcttcactgagaaaaaagtgaatctgctgcacgtcgcttccccctttgttggcaaagcatacgtacagatatcccgcataagagtcgtccttatctccctctctaatggtcatgggaaattcctttacacagctggcatcatttgccgccacagttgctgtcagagtaaaatcataatttccctgccccgcatagggacgggtaattttaagagtattcccttccaccttcacataaggggcgtcctcctctgccacactgtactgtatagaagctccgtccagtccttcgactgtatccggaagaatcagatcccctgtcagctgctggcgaatctgggattctttaatatttagatttgactctacaacggatgagatgtcagacgcagccaggacctctgcagggggaactgccgatacaagcataatgccgcataatccaccggctaagatacgttttgcacttgataacttcatattttctcctttccatatacctgcttctcctgtcttcaggaggtctgccttgttcttgaccatactccgctgccgtttacataataactgcctacccattcactgaccgccatggctccgctatttttcagataataccacttgctgcccaactgcagccagcctgtggccatcgctccattgctcttcaggtaataccaagtttttccatccagcagccagcccgttgccatcgctccgctgcttctcagataataccaggtttttccgtccagcagccagcccgttgccatcgctccgctgcttctcagataataccaggtattcccattcagcagccagcctgtggccatggctcctgtgtccctcaggtagtaccaggttcctcccagctgtatccagccggtagccatcgccccattgctcttcaggtaataccaggtttttccgtccagcagccagcccgttgccatcgccccgttactcttcagataataccaggttcttccgtccagcagccagcctgtggccatggctccggtatcctcctgaagataaaaccagctcctgtaggcagtgtcatagagccagcctgtttttttcttcccgtcttcgtagtagtaccacttgtcaccagacagcttccagccaggtttcagctgcggctctggtttttcacttacaatcacgtatgttgtgtattccatggtgaatccgctgctctttgcctcaattttcgtagtcagcattgcggtcccgtttgcaactgcagttactgtgccatctttgtaaactgccactgcttcattgtcggatgcatacgtcacattcaccgcgccctttaccgcatcaggaactgtatagagcttctctgaggtgccggctttatacactgcctcctcttttggcgcactggcgtcaattaccccccatggatcctgatattccggcttaaacacaagcttttgcaccgtccggtctatcttggcaatcccggcgtctgcttctgtctgggtctgtgctctggaggccgccgccacagcatcccgcagggcgttggctgacatttctgtgaagttgctcagatccagcgcatttgcctgctccagcttttgcttcagggctgttgcatcgaatgccttaaccgtaatgataaattgcttttccgctttcagtgtgcccgcggtaacggttgccgtgagcgttacctcccggtcagtatccccgttatatacctttccggttgcagctatgagatcactctccgccgaccagcttacatccagaccgtctaactttgaaggaagactgagatcgtagcttacgttatcaagtccggtatttttatttcccagaatcttttcttctgtcagagatgcgtccacctttgcctgcagtgcctcctgatacgcaggatccccctgctgtatctcttcctcgctcagggccttgtcgtagattttaaaggaatcaatctttcccacaaaattactgtctgcactccagcaggatttgcccaggtatcccaggattccgtccttggtccctgcagatacaatctcttccatacgaaagccggtatccagcgcaggtcccgcctctatcccatcgataaacagagatactttcccattttcaaaaaccatgtctacggtgtagtactcatcattggacaacaccagggatgaatttatcagattttcggaagacgcgttcttaattcctgcccggatactgttgccgctgtattggaagtatggggcatagaacatatagtttgttcctgtactctggggaattgagccaatgcagaagagccaggaagctgctcctgattttgaactccttgcgtacgtagcctccactgtaaacgcttctttatccgtaagactctcgtagattttcgacgggagagtaatatagcttttattgccggtgatttccatcacatccctgtctccgtctcctatgaatttcactgtctccggatttacaatggaggcgtcattcccaagaccggaagcgtcaggaattacgccgtttatggacgctgtcattgtatagtcagccaccacgccctcttcccgctctgtaggattttttactacagtcaccgctgtgtcccttgtctgtgtgacagttcccacagacaccgtggatgtcaccattgtcttgccctctttcagccccagtacggtaccgtcttcagatgcagaagctatggtgccatcccaaacctcaaaagatatctcagcgttttcctctgtcacgccgcccggcagattcacctggatctgctgggagcttccctcatacatcgtaattctctcgtcagccgtaaatccctcttcctcaaagatttcctcttcacttctggagtcatacagctggtaaacctgggagggcgtcaaagcctgatcgtatacctgtacctcgtcaatcagtcccttgtataaatcatcccagttattaaccccaatgctgatgtcgttgctctctgccgtcagcgccctggccgcctgtccagagcctgccggactaccatttagatacagggtaaaatcatagccagactgggttactgtgaccaaagtccaatgatttttctccagatttacattagagatgggtgttttgtatccaaactcaccggtcaccttatcatttgtccaaactttgagaacttgattattatctccagccacagatacccactgttctgttgcacccagggcagaacctatatacagcagggagccatttaccggcaccgcctgtgaggggttgacccacatagatactgtgtattcctctcccgtatagggatgattcagcttcagaccatagtctccaagtctgacagcctgtccttcatgcccttcggcataggcagcctcacccgtatactccgccatctttttcccgtacatagaactgccgtccagttgattctcaaaggaataggtttttacaggctgaggcaatccctgttcatttccctctgcgcttacgattgtgctgtttgccgttatcgcagaaagtgccatcacacctgccaaaaaacctgacatcagtttcttttgcttcatcctcttactcctccttctttctattcatttcccaatatcaaaccaaatgctgtgtgttttatccctcccttctgttccataccgtatcctgacctcctttcccttgaaatcgacctcctgttttatacaattataacaaccgatttcctctgtttttgtaactttattatgcaaagtgtacattttctttctgtacttctgctgtaaataggtttttataggaactttgtacgttttcgtatttttccctgtctgtctgcagaatccgtttggacttattgactttctctcttttgtgagatagtattttagaaacaggaaatctactgattcttgtgatatttcccacttaggaggcattcacatgctaaaaacgttcgacgctgccatcatcggcgctgccattatagatatcccggccggcccggtagacgcatctgtctttgaaactggttcccatcccgtgccgtctgtcaccatgtctctgggcggcgatgctatgaatgaggcagcactgctggctaatctgggacactcggtagaactcatcagcaaaataggcgctgatctacccggtcaaatgatactggactactgccatcagacatttatcaatacagagcatgtcatccgggataaatctatctccacgggcattaatctggtgctggtagattctgacggtgagagaagctttatcaccagtcaaaaaggcagtctgcgcaaattaactcttgaggatatccctctggatattttctccgatacgagtctgatatcctttgcaagcatctttgtctttccttatcttagggcaccggaactgacagccatttttcaggcagcaaaaaagagcggcgccatcctgtgcgcagatatgacaaaacgtaaaaaccaagagactatcgatgatatgaggccttatctgccctatgtggattacctcttccccaatctggaggaagccaggcttgtgacaggtttaaaggatccggaacagatagcagaggcttttcttcaggctggggttggccatattgtccttaaactgggggccaggggatgtctgtgtgcctctgccagggaacgtttttataccagagcctatccctatgcccgctgtgtggataccacaggcgccggggacgctttcgcagggggatttatccatggaatactgaatcatcgggggctgaaggaatgtgcaagatatgccaatgctgccgcatccatcgcggtggaacgcccgggatccctgcagggggagattcatttggaagagatcctaaaaagagcagatgaaatataaaagacaggaaagcggtaccctgcacgcttataagcatacgggataccgctttcctgtcttttaaattctattttgatactgtttactctatgccaaaatattcccatacatactgtatatacattgccatacagatgggcaggcagtcttcgtcaatatcaaaggttccgtgatgatgaggggaggctattcctttttcttcatttctggagcctatattcatataggttaccggggctgtctccagatattccgcaaagtcctcggctcccaggctaagctcctgttcttttacagcctccgcccccaatattttagatgctgcacagatagctgtgtctgtcattctatgatcgttgaaaactactttcgcggtgatttcaaagtcaacggacgcctggcatttgtaagcagtggctgtagctgctgcgattctgcgtatggcatttctgtttaccgctctttggcactcttccagcacccggatactgccttcaatataagcatcctccggaaggatattgaaggcggtaccgctctggaaaatcccaacagtcattaccgttggcttcaggggatcgctctccctggtaatcacactctgcagggactgaacgagagatgcccctgccagcagagcgtccgcaccgttttgcggcgcggaaccgtgacagcctcttcccttgatccagatacggaacttatcattggcagaggacatcaccccttttcgtatggttgcctctcctataggaagagaattagagacatggagcccaaatacaccgtccacgtccttcactgcgccgctttccactaccgtcctggcaccctggccattttcctctcccggctggaaaatcagttttatctttcccggaattctatccctgtgctcctgcaaaaaggcggcagcacccaagagggcagcagtatgtccgtcatgtccgcaggcatgcatcagaccggggtgtttcgacgcatagctgcactgattcagctctgtcatttccagagcatcgatatctcctctcaggcccaggattctgccccggctgtttccctctataatgcccacggttcctgtttttccggcctctaaccagggaatccccatctcgtccagcctccgccggacatattctgccgtctcatattcctgcatactcgcctcagggtgctgatgaagatatcttctggtggaaaccagctcctcccgctgcttctttgcctcatctaaaatgtccattttattctcctcacacataatcgttatcctttaatcccttttctcacattatctacccagctgtcataagtctcaaaaatatgctccttattcttctgatagatttgattcagctttgatactgcctccggatcatcatctacccggaaatctatatagggaaaaccctggatcttatctacccggataacagcggcttgttttcccctgcggtctccgccgctccgatctgccgcagtcagcgcattcatcagccggtctgccagatttcctctggtctttagaaaagcctcttccatctcctggagcacctctttacctgtgagaatattgccggctatcacatacccgtctccccggagatgtagctttaccggatcgttctcactccctgtaaatgccgctgtgttacctttatagtctaccacagatatctgtctcagttcctttcccttatcttcctgtagtgccttgtgcagtgcctcctccgcggacgctccccgctggattctgcccataacgtcctcgttcaggaagggatttacccatccttgggaagctatgatcccgtgtgagattctgatgaaaggggaaaacgcccccagccccggaaaacaggaggctgctgcgccccccatacacccagtctctctgcacacggcaataatagaatatgtattaaatttcatggattacctccgcacttttatatttgtcacaggccacataatggccaggctctgcctctgtaagttccggaacttttccggcacatgcctcgtccccatagggacatctcatcctgaacgcgcatccccggggcagatgaatgggacttggaacctcccctgtcagcctctttctctccatcccagcgccgggcaccggtatgggaatcgcagagatcagggcctgggtatagggatgcagcggccgttcatacaaagcatctgatggggcaatctctacaattcttccaagatacatgaccgctaccctgtggctcacgtactggaccgatgccagattgtgagagataaagatcatggtcatctgaaatttttcctgcagctccttcagcagatttagtatctgtgcctgtatggatacatccagagctgacaccggctcatctgctatgataaccttaggattcagcagaattgcccttgctatactgatccgctggcgctgtccccctgagaattcatggggatatcgtttcaaagcatccaaaggaatccctgtcatttccagcatacgggtaattctttcctcccactgttcttttggaatgccgtgcgtccgcagaggctcctccagaattgcctttatgctcattctgggatcaaatgcagcataaggatcctgaaaaatcatctgaaagtcttttctgtgtctccgaagtttctgggaggagagatccatcagattttctccttccagtaccacacttccacaggtaggctcaatcagacgcataatcagtcttccaagcgtggatttcccgcagcccgactcgcccacaatccccaaggtctcccccttttcaagggttaaagtaacgttctgcactgctttgagcatttcctttttatagggaaacattcttcccttgactgcaaactctttggacaggccgctgatttctagtattatttctctatccaatcctgcccacctccttgcaagaaacataatgtccggaagcaatctccaaaagagaggtgtcccggctgcactccggcttccgatctggacatcgttctgcgaattggcatcctgccttctcttcatataatttgggcggttgtccgggaataggaatcagcttttcttttctccccagaaccggaacgcaggccataagccctttggtataggggtgcaggggatgttcaaacaattcttttaccggagccttctccacaatctctcccgcatacattacagccactgtatcacacacttccgctaccacacccaaatcatgggtgatcagaagaatagcaactccgaaggtatctctgagttccctcaaaaggtccagaatctgtgcctgtatggtaacatccaaggctgtggtaggttcatccgcaatcagaatctccggctgacacatgagagaagcggcgatgatagcccgctgacgcattccccctgaaaactgaaagggatagtcctccgcccgctcttttgctgaggggattcccactttctgaagctggataattgcctcctctaaggcatcctgtttctttttctttcggtgaatctccaaaacctctcccacctgtcttcccactttcagaacaggattcagtgaagtcatgggatcctggaaaatcatggcgatcttgtttccccgcagcttctgctgctctttttccggcttatccagtatgttttctccgtgaaaccaggcctcaccccttactatttcatgttttttctttcccaccaatcccagaagagaattggctgtcacagattttccgcatccggactctcctaccagtcccaggatttctccttttttcagagagaagttcacgccccggaccgcatgcatatgtccctgtctggtggcgaattctacctgcagattcctaacctccagaaggttctcattactatttgcttctttcacagcagttccccctctctaattttccacattcctgagacggggatccagaacatcccgaagcccatccccaagtatattaaatcccagcacagccagggctatggcgattcccggaaatacgcccacccaccaggcaatctcaatccatgatttaccgttgttcagcataattccccaggaaggaatgtccggctccacgccaattcccaaaaaacttaaggctgcctctgacaggattgcaaaggccagagacaaggtaatctgcaccaggataggggccagcacattgggaagaatatgacgcactataatagagaagtcagatacccctatggatcgggctgcctccacatggagggattcctttaccgtgaggacagctccccttgttattctggcaaaaataggagtatagacaatcccgatggcaatcataatattattcaggcttggccccagaatagccatgattaacagtgccagcaagacctcaggaaaagcaaacataatctcaatcactctggaaataatcccgtccgtaagtttgccgaagtatccggccagcacccccaggcatacacctgctgccgtggcaatgctgacagagacaagagacacctgaagggagattctggaaccatagatgattctggacagaatatctctccccatattgtccgtccccagaagatgcttcccccccggcggcatcagcaccgctgtgctgtccatatagtaagggtcaaaaggagcaatcacaggggccagaacagctgacaggataaacagcagcaggataaggcttccagccacagccagcttgttatgtataaaacgatgcataaactctttcataccagccctcctaataacgaatctgaggatttaccacacaatacagcaaatccacgatcagattaatcaatacaaacataacggcaataaacaatacggttccctggagcaccagataatctctgttattaatcgcctgcaaggcgagggagccaatgcccgggagtgaaaatatttgctctattaccacagatcctcctaagagagatcctgtctggagacctaaaatagtcagcacctgaatcattgtattcttaacgccgtgttttaagatcagcctggtttgagagagcccctttgccttccccatcttcatatattcctgatctactacctcaatcatcgctgaccgggaagaacgcataaccacagcgctcaccgccactcccagagcaagagccggcagaaacatacatctcaggtttgccagtatcccctcagaaagagggacaaatcccccggaggggaaccactttaaggtcagggaaaagaacaagaccagcatggtccccagccagaaccccgggatagagatcccaagaagtcccagcacggtaaccgcagaatcgggcatacggtttctcttgcaggctgcccagtagcccatgggaattcccaccaatacagccatcagcaggctgaagagggtaagttccagcgtaaccggcacccgggaaaacaaaagcagggctaccggctgattggaaatataggaaaatccaaaatcaccggtcagaattcccttaagccatataaaatactgggtgattatggactgatccaatccatatctctgccgcagagccgccgcagcttcttccgtgtactgggttcccagagtaaccgtggcataatcacccggaatcagccgcacggcaaaaaagactaccacagagattcccagcagcacgggaatgatactaaccaaccgtttcagaatatatcgaagcattctcttctcctttcacagatatgcaaaatacaggaaagagcctgacgcatcagactctttccggaatttcataatttactcaaaataaacgtccttcaggaaaatggtagtagcggttggatgcaccgtataacccttaacattatcccgcatggcaacggtaaaattgttcatgtacaaaaacgccatgggggcatcttctgcaattactttctgtgcttctttgtaaatcgccattctctcttccttgtccagagtggaacggccctgttccaacagctcgtctaccgcagggttagagtacttctgctggttatacgcaccgcctgtggtaaacaggttatataaatattcgtcagcgtctacaaaacctgaccaaccgcaaattgtcaggtcaaagtctccctgattcagaccgtcaaaatacacccctgactccagtgcggaaatctctgactcaatgcctgcctctgccagctgctgcttcaccatctgcgcggcatctacctgatactgccagtcagaaccgacagtgatttttaatgttatctcgccctcctcatatccggcttcttttaacagggcttttgccttttccaaatctcttgcaggataaacttcatcaccgccgtagtactcatgtgtggatggaatattagcctctttcagtacttcggcatttcccatttttacagccgtattaatggcatccctgtcaactgcattggcaacggcctgtcttacttttacatccttcagatattctgactcacagttcatgcccacatattcccagaaggtacccggaacagattccatggttaccccttctgcgtccttcaaaactgcaatttcctgatctatggcatcgataatcatatgaatctcgccgtttctcagggcagtggcgcgtgccgtggcatctgcaattgtctttaaaacaaggctgtttacttttggaagcccctcctcccagtattcagggaatgctgtcaggttcagactgctgccctctgtccactgttccagtttgtatgggcctgaccctgcgtctgcattggcaaggctccctccgttttcctccaccactgccttctccactattgcatttaatgaattggcaagataggtaagaaacggtgcgtactgggaggaaagtgtaattacaacggtgttctcgtccggagtttcgatggacgaaaccttgtcaaactgggaagcccgtgcccccccattcataattctctcgagagaatattttacgtcctcactggtcatagtattcccgctgtgaaacttaaccccctcctgaagatgaagggtatacacaagctcatcctcagaaacctcataggattcggccagagagggcgccacctccccataagcctccgtatatgtaaataacgtattgtacatgttctcaatgcagatcccagccgccttatcggtcaccatatggggatccagtccgctggggtcagactgaatggccacaatcaactgatccccatctgtctctttggacgtatcctgcacacctgatgaagcagcctccgaggtatccgattccccgctccctttggaatcaccgtactccgcaggggcatctgaacatcctgacagcacaagcgccgctgacaatatcagggctgacagcaaactaattctttttttcataccattgcctccataatcttttgtaaattaccttgcactcattcctctaggctgctgtattcaccggttaattctggttttcttacagtgtgttctttataaaataaagtacattcggaaaaaatatttattatataaagttttatcgcctaaatagtatgttttagtaattccattagggaaatcttagcagaaattagttgctttgtcaaccgccaattaatgctttgcctttgaagaagacaaaaaagaaaattttgttaatttcttaaaataatactaacaacagcagagtatcttatggtatcatatacatgcagaaaatcattccctgcttcagaatgtgtcaagcagggaaaccataggcggggaatattcatggacaaattagataaagaaatacttaaaatattaagccagaatgggagaacttcttttaaacagatttctgaggctgtgggactcacctcccctgctgtcaaaacaagaatagagaaaatggaaaaagataatattatcaagggctattctgtcaatctggacaataaagctgtgggatttatggtgacagcctttatcagtgtggctgtggaaactgcctccagagatgagttctattcttatgtgcagtcctgtcccaacgtaattgagtgtcatgggattacaggacaatattttgctttgctgaaagtacttttcaagagcaccatggatctggataacttcctgaacaagattcagaaattcggagaaaccagtactaatatcgttctctcaacctataaagagccgcacaatataaatctgatggacgaagagatttaaaaaagagaaagccgtattttgctacagctttctctttttttattctaagagcagtgtctctctgtaattgtatacctctcgtttcctccagagcagaaacttccgctttagaaaaggctctccgttccttttggcctggtcctggtccctgatttcatattctccgttcgtcacaactatgataagtttggacctggcataatacattttcagatatcccgccagtttttccagagtctttttctctttcacaggttcaaatccctggtaaaaagctgacatcatcagacggggcatagccgccacggtggattccactcttccatccgccttccaccaaagtacattcagcctcacattgcggaacacttggccgtggcccttcagggtttttacaagctctataacggtatcctctaattcttctttttccattgcgcaatccagtaccagcgccatctccagtatttccttggtaaagttacccggtacatggagtacacgctctacctgctgcagcaatttctgacgttgtacaatagtaattgccattctctcttcctttcctgttgtctaatgatataagaacagactgaaataagatatctgtctgccgtttccccagtatgtcatatcacatgcctctgccattttatccgcctgtacacagtaggcagacaggcaggagctgatctgttccggataggcacactcctcccctttttctcttctgcagggccggcacagatcgcaggggccggccagcataggcagtccggtaagtcccgcctctttcagtctcctgataaaagctctggatctcttattatgttcctttttcaaacgggccagctcttcctgggaattcatgtcttccacctcacagactgtctgaaataccagggcattttcatattctctggccctggcctccatctgttccggtgaaccacagtccggagggcaggaataattgtccccgtaattgccgcagaggttctcctcacagtagcgccggaaatcggcgttgaataccagctgttccgcttttatcactttagcctttgtaaaccctgcctcagcagccatatcttctattaaatactcttccatacgaacctccttatgatctttcccacagttcccttccatgctccttcagccacctctgatatattctgtagtccggcatggcatcctccacaacctgataaaacccaggggaatgattcatctccttccggtgggcaagttcgtgtatcaccacataatccagcaccttttcgggggccagaatcagccgccagttaaaattcaggctgccttttgcactgcagcttccccagcgggttttctgttcccgaatggtaatccgtgtaaaggtaacccccatgattttggagtagacccgcaccttatctccaatctttttccccgccatctcaatcaggtgctgcttttccttgggggagtagggtgggaccgcctttttcttaagttctgcccttctcccggcaattttcttttgaatccaaggttctttggcagccacaaattcttctattattttcttcgggcacccatagggtgccctcaccagcagttctgccttctctgtaatctgtatgcacagcgtctttcttccgctgtacaggatgtcatagttcatagcagacccctctcattttctaccccttccaatggattcattcccttgttcctatccggcccttctatccttctgactgttcatgcccgaaaatcaccctgcacagatacatgtattcctgataagcctgcgtatcctccaactctgacaggatttcgccaattgtcgtataataccaccgatgcatccctggatccgtgacattaaacctctgccatatagcttcgccttctttgtcatagccccttttggtggccctcatattggacagcttatccgcaagtactattttttttaactccgcgggttctttcttaatctggctgatcatctccatttttctgattttccaggaatcttttgccggaagatgccgtctcttatcttcggtctctttcttcaccagtttcagcaccctctgcccgaacctctgttccagttctagctccccgctgggggtatcttccagaacgtcgtggagtacccctgccataagaatatccggatcctctgtcatccctcttaagattgaaagaacctccatgggatgcacaatatatggaatgccggtccccttccgaacctgccttttgtgggcctctgctgcaaactgcagcgcctgttctatggactcctctgtcttttccctctttaaaatataatcaggaaacaccggcgccagaccggcacctatcagaccgtccgcatactttttccactgattgggtgtacggcagtctgtcctctcctgccacgggaaatcataatatcggcagacaggctgtccgttcccgtctctcccagtaaaacagggacaatagctgcagtataccggattctctaacactgcattggcagctctgcagtacagtctgccttcacggtcacaggccgcgctgtggggtatgcatctgtaagcatactccttattatgtattgcctcttcctcttttgtcatgacaaaagccccccttgtaatccctttatccgtaattggaaaccgggctgcacgctcccgtatcacccgcatatcttcattataacaaaaacctgcagtttttatagatactcttttaagatttcccagattccttcttcatcgttggatgctgtcacggtatcagccaccgcctttagcacagggttcccattggccatggcaactcccaggccggctgcctcaagcatttccctgtcattctcaccgtctccaaacgcaatcatatgctcttttttcagccccagccttaaaagaagctcctccagagttctgccctttcctgcccctgccggtccgaattccagataccggtccagggaagaagttacatagaggtccggaatctgttccgcccggctccgcagttcccttttcagctctggatccgaaactaccaaatccattccctctatccttccaaggttctctcttataaatccttttatatctttgacaggcttcctggttttctgcacataggccgcgctttccggggacacacggtatgccccggggttttccacgtaggatctggaagcgtatgcctgtccttccataaacacctccaccggacacggacaggagaataaaagttcagtcaattcctccaccgtgcggcgctccatatcgcgcccgtagacgcgcatctgatccttcagggaaaacaaactgctgccgttggaggtaatcacatactccatgatcccccatttactcactgccgtgggaagtgcagtaaaagctcttccggtggctgccactatatgaatcccctgagctgctgccttttccagaatctcctttgtttttggcatcacctgtttatgagaattcaacagcgttccgtcaatgtccatggctatcaattttacctgtcttgcttcctctcttctattcatatactgttaatcctctcaagaagatctctgttagcttcctcaaacaacagctgcttattatacctgtaatatctctcacactcatattcctgaaggaatttcacactgtaaacattggcgttcagttctgtcataaagattaccatctcctggctctctccgaaggccgcctccataaagtcaaagacatgctccagtctgtcctctgacttcttctggaaggcttccagcttttccgtttcctcaagaaacaattcctgaagccgctcaactgctgtctccggatccccggccttctcagtgcgaagaactgaccggtaagcttccagtgtattgattgtccataccaatgtcttcttctcttccctccccagaatctctgctttcttcttgttttccaattcctgttctaacagggagatcccctgtgtaagaacctcctctggtgcagctgcagcttcttcctgtgcaatattttcctccagatgcttttttattctcttcagctgctggtaaagccgctctacataagcctccatctcctgttccttccggaaagaggtactcaggcgttccaaaaacagaccgatcacactgagacgctcatcaaaggatgcatgggacagtttctttaggagcaggctgtcaatcttcccctgcagcacctgctccacctggtaatccgcctgatacatatagtacagttccagataattagcgaagtctttagctatcctgggatgctgaatgtattgaatgacaacttcccgatccacttttttcttcagtgtctcatagactgctatcagcctggatagatcctcccagcctctgggggtggcaaaaatctttccgtccactgttgtctccatctgataaaaattccctggttttgtattcagataggaaatcacggccccatgtatattttctctgtaagcgtactccttccaggcctgatattctggctcaacctggatcttttttacccggtccatagttaccacatcaaactcccttacggatttgttatactccggaggattccccgctgcaactatcagccagcccctggggatggcatgatttccgaatgttttgcactggaggaactggagcatggcaggagccagtgtttcagacacacagttgatctcgtcgatgaaaagaattccctcttttcgccctgtctcttcgattttctcgtagacagatgccacaatttcactcatggtatactctgtcacagaatacggcctgccgtcaaactccttctcggagataaaaggaaggccgacagcactttgcctggtatgatgggtgatggtgtaagaaaccagtccaatccggcactccttcgcaatttgctccataatctgcgtctttccgatgcccggggcacccaggagaagcacaggtctctgcctgatttccgggataacatattccccttcctcatccttcagcagataagcctcaatagaattcttgatttcttcttttgcccttttgatattcatgtatatctccttttatttctcaatccacttctatccctgggttctccagatcctccggttccagtatcagcttgatggcccagggaggcacatccacatcctgaaagtcctctttcagaaagacaaaggcagtttcatacaaaggcatggccgcaggataggtaccataaccgtccgtaaaataaatcaggcctttcagcttttcaaacgttccttgttccaccagtgtattcacataggcaaaagccggcctgaaatccgttcccccctgcccaatgatctgaaaatggctcatatattcttccagctcttccctgtttgtgattaccttatcctgctgaatccggtcatcacactggataatatgaatctttgccttctgaaagaagctctctgtcccgctgagcacagagtaagtctcctccagaaatttcttcacaagctctcccttgcaggacatagaagtgtcgattacaatcacaaaatcctgtatcttttttatctcttttgtctcctgcggctctatgagaggcatattcccgtaaagggacatcccatagtggtaaaaaatgtaatcaaaggtatccatatccaccctgatttcctccctcatcacagagaattttctgagaaagtctttataatcgtatctctgacggttttcagcctgcacctgctctgccagacttttagaatcctccgatgcctccttggagaatgtctccatctctgtctgcatcctgtctctgatgtcatcccaccgctgctgcatctgctgctgtctggggtccttttggttttgcttccacttgctgtggtcgtctgcgtagaattcagcttcccagtgggcaaggcgggccattccatcctccccgggaaacatgtcctccagtattttgtagattccctgggcagtcactaccttcagccggctctgacagatttggtatactttcttcctcagcatatcttgtctgcgccgtatacttttctgcagaaatccgtcaatggcatattctgcagctatgtcacaggcgagatgccatcttcggacctcccgttccttgcttccccagatgtggcgaaacaggcagtgaaaaatcatatgaagataggcccggttcacccagacccttccctctttgtatctttccaaaagagcttgggggtgaaaaaacaggcatcttccgtcgcagcctaccccatctacctcctcctcaggggtgaaggcaagggaggacagagccacatccagaaaccgcatgcccagatacagctcattcctggcatttctgaggatctcttttccaagttcttgttcctttacttgtcgttcttcctgtttctgcagcgcattcataaggtctccttttttcttctactataacacaaaacgccttctcacggagggatacatggtatggctgaaatctaaaagaaagctgccggcctgggcatacccatcggctcctgccttctctgtcagagtatgcaacgtctctctgcctttttgacccccagggagacagttcttaaccagaaattccagctgattcagctctttattctctataagagagcaccctacgctaccggcattctctctcagatattctatatacctttcttctgcctcctttgtcagccttaaggggtacagaagccttcccaaagcaatccgggccgccagctggatattctcctgggcttttgccagataaaacagggaatcatattcttcaaactggaactccttctccaaaaaacaattgcggtaatgaagtcccgtgccgtgcacatgtgtctccagaatacgggcaggtgtattctccaccccctcctcgtaatattccggaaaccacagacaggcatcctcctccccgtgatagcagacacacaggacttccgtcagctcagtcaacagttccttcagccctgccgcgtcctggccacatacggtaaagtccagagttcttacccggtgacacccggtaaaggcaccagcccctatgtccctcgtcctgctgtaaaaccgaatgctttccagactgctgcagttgtaaaaagtataacgtccgattctctccagtgtttccgggagagaaatctccttcagccgcactccgcagagtgcctgagggggacttagccggtcagcactccttgcggcatctatcttttcctttattgttccatccatatgctcagaaaatgcataggaagcaagctccgctacaggttttccttctatctccccgggaatccccgcatattctccaaaggaaaaacagcgtaaaatttttacgccgtctcctgtgacctcatatgcgaactccccgttccatttaatttccatctgtcttcaccagttttcttaatacttttaataccccatcatttctgctggtgtccgcaatgtgtttcgctgccttttttacttcttccctggcgtttccgatggcatagctttcttctgcatttgccagcattcccaaatcgtttccattgtcaccaaacgccatagtttccgagcggtctatcagaagtgatttctgaatactctgtatcgccttccccttgtctgcactgtagtctgcgaagtcaatccagatccggccggccagcatggtgcggaaggtgccttcccaccgggatttcactccctgacttataccgtccacgccgtctctgcagtaaatagataccttaatcatggggatatcctcttttaaaacatcctcaaccacctttacctgattgtggtacccatttaccagcaggtcataaaggcctgtatctgcccgttcgatatacatggcatcttttgctgcaacagcgacctcacatcccttcatcctgcggatctcctgcaccagttctgccgctttggttctgtccatcatcacttccagcatatccacatcacggcacacaacatacgctccgttctccgcaataaaaatcatatcatgagcaacaggatcaaagagtcttcggatgctggcatactgccgtccgctggctgctgcaaatataattcctttttcttttaaatctctgactatatcaaacaattccggattcaatctgtctgtaccctcgtccagaagtgttccgtcaatatcggtggccactaattttatcataacgttctcctctgaatcttgataaaatactatgatattgggggcaaaaggtattttgtccccaactgatgcccacggattgttccgttgcttcgcaactcccacaatcctacaaacattcggaatccgctgatttactgcataaatcgctgcttcctcatgtttggcggatccaatgttcaaatgccttatcatgcaagcatgaacgtcatttcgaccttttgatccttgtatcatactatatatattcatgtttgttattttgtcaatccctattatatttgattttagttcttatatctacactttttattttcttattataattatttaagatttccttttcacttcaagccctgcaacatgccttgaaaagtacatggtacagggactgtctctcagccaagactctgattgcttctgagcgtttttaggtgtatgatgtgcataagggagaagaaatacggcgaacgccgtgccccgccttaagaataaatacaggagggtcccgcagtatgatgtatatttgggaggataagctatgacgaaagtaagaatcaaacctggaatctgtaattttgtaaccactgtaatcgccgagtgttctgacgaagaagaaaccgaggtaaccgtaaaagtaaaaagcggctgtccaagtgtcaaaaaaatgatggaggtgctgggcgatacctttgacgcctatgaggtctgtcttgtaaaaccgggggagggtcccttctttgagtatgcgaaaactaattttcccgttcacgccggatgtcccatactggccggaattacgaaatgtatcgaggcagaacagcagctggctttaaagaaggatgcttccatagaatttatagaagaataagccggttctttggcttcggaatctcaaaagacagaaaacagatctagccggcgccgggaaatttcccaatgccggctagatctgtttttctttttccctgctggttaaaaaatggtgtatcccccatccactgcaagccctgtaccatagataaaggaagattcgtcactggccagaaagagtattgcttttgccacttcctccggctgtcccggacgtcctgctggatccattttaattttcatggatacaggatgctgaggcatctgaagaattcgggcgatcatctgcgtatcaatgggtcccggaagcactgcgttgatgcggacccctttggggccatgatccattgccatctgcctggtcagtccaagaagcccgtgctttgctgtggtataagcaagacctcctcttcctgctgcggtggatgccatggaagcaacattcacaatatttccccctccctgtttttccataataggaattacccttttgcacagggagaagggcgctgtgagattaaccgccagaaccttattccactcctcataggtaatgtcatccatgttcgccagacttccgcccacacccgcattattcaccagaatgtcaatccggccataggtttcaaggcatgccttcaccagtctgtcaagctcctcctcagaggccacatttgttttctgataaaaggcctcatggcctgctgccttaatttcttccacacaggagttcccggcctcttcgctggttcccactaccactacctttgcgccttcctccgcaaagagcctggcagctgcccttccgattcccttggttgatcctgtgattactgctacctttccctctaatctcatataattaaacctcctctttttatttcagccaccagtcccagcggatgtaggaatacggcaggaattccataggatttatctgtcccagattttcaccggattccagcacattgtcacccaccgtaaagattcctccgagcatcttaaccacctcaagctcagcccacgggtcatgaggggaatctgtaagcgccatctggcatactgccatgtctttttccttattgttatagaccagcctctgccgtacaagggttggtggaaggtcaaatccactgccgtccactgccttggagtacttaatgttatacataggaacaccgtcaccaatctgggtgtccaccacatctcttccttcctccgcattcattttcccggtaatctctgcatcaatgtgaaagaattcaatgccgtttctggtaatgctgccagtcagactttttccctcacagttcatctggatatctgcaggtttttttggcagtccgcagatttcccgccccatagccatggccataccgtcggttataggcatatccaggcagtagtttcccagtactccgtctttttccgccagcacaaagataccggcctctttatatggagggcagaaactggttctgggatagtctgcaataaatgcgtttaccagaggcaccggccctggtttcagacatttcggcaagattttttcaataatttccggttttgtctcccaatatacggtcagcatccgggcatcaaaaaatatggttttccccccagctgtctgctgtaactgttccatcgttttaataaagctacccatacaattacctcctttaatcacctgattatctcaaatcactggctgcctcataacctgcctgtacagcctgcgcgatccgccctacctttgacgcgtctcccaggatacaaacccgctcaaaattctctctgagcactctgctgaacgtaggatcattttttactcccagggaaagtacgatctgatccgccggtatctctacagcggcatggtccttcatgttctctgcccttacaccggccttggtcacttcacagagtttgcaggatgggatcaatgtcaccccatattttttcagcctggtaacaatatcaataaggttaggtgtgtacatgcctggcccgatattgggaagcatctctattactgtcaccttgtttttctgctctgccaggaattctgctgtttccagtcctgtcataccgcttcccaccatcaccacatttttttctgttactgttaccttctttctcaaaatatcagttactgtacatacattctctccctgaattcccggaagcggaggtataatatttgtgcccccaactgcggaaaatacagcatagggctccaaggccttaatctcctccacatccggctcccgctccaggtgaatctctgcacccagggtcctgatctcgtgctccagatactccaggtaccagctgattttttcttttaacgggggaactgccgccagccgtgcgcttcctcctaataccggctgtttttcaaagagcacgggtataaatccacgtatagccagaactctggctgcttccatgccagccggtcctccaccaagaataacgacccgtctgcccgctccgtcctttgaaagcccggtcagctcagtctcacggccacacctggcattcacagcacacttgatcatttttccgttcagtacatcttcaatacagtacagacaggaaatgcagggacgaatttcttcctctttaccctccctggctttatttccccactgaggatcagccagctgtgctcttcccaaagccacaaaatcctgaataccttcctccagaagctgctccgcaaaatcaggttttctgatcacgtcacaggcaatcactggtatatgtacggcctttttcacggctgctgccaggtgctttttccatccctgaggataagatgtgggctcaataatagtattaaccgtttcataagtccctgcgctcacgttgatgacatcaacccccagctgttccagagctgccgctgtctttaccgcatcctcaagcccaaatccgcccggcacaaattcatctccgtcgattctcacagacacaggaaacttttttccgcaggaggctttaatacccccgacaatctctgccagaaaacggaatcggttgtcaaagcttcccccgtatttatctgttcggatattactttgggggctcaaaaaagatcctaccagatatccatgggcagcgtgaatctccaccccatccatgccagccgccttagcgatattcgcccctataatgaatttttttaccattccctccacttcttctgtggtcatctctcttggcatctccccgatggcgctgctcataatcgggcttggacctgcaatctgccttccgtctataaatttggagcggttttctcttccggggtgatgcagctgaagaaaaatcctggtgtcatatctgtgaatccgcctggccagacgctccagaccggggatataacggatatggtttgcacacagctgacagggtgtgccgatcccagtctcatcatccactctggtaatctctgtgataatcagaccacagccgccctccgcccgctcttcatagtaacggataatttcctcattaacctcaccattgcatccgggaagattggtgcccattgccggcatcacaatccggttctttgtctccaggcacccaatctgtcccctctcaaataatctctgatacttcattgccgcacccatcctttctgacgatattctctctttcccctcattgccttatcaatttctctgtgttatagttgaattatagtcaatatatcaacaaattcctatgttaaccagtgccaaaaatacctacaccaatggtgcactgtgcataatcataatgaggagactgcctatggaactcacacagattccctcccgggaccatatctatgccagactgtttgaagcctacgtaaatggtgaaagcctccaggccttaatccagctgaccgcggatctgctgctaaatcctattatagtcattaatgtcagctaccaaattatcgggcactctaatatcctggagatcgcagattctttctggctggatcatattaaaaatggattctgtccctacgaattcatcgtaaaagtaaatacgcttccctgtgtaaaagaaggaaagcgcaaagagaatacatatgaggtttggtgcgaagaaagccaaaataaaaagctggtatctaaattgaagaataaagatattcccatcggaaatgtaatcatgatgggatgcaaaagagacatccgtccggaagattataccattttggaaaaggttgccgccctgtacagcatgaaattgtcggagtatcagaggcccacccatcagcgcccccagtctgtgtactacgaaaacctgctcctggatttaattgaaagaaagcatctgtccggagaggagattctgtcctatctggaactggggaagcttaccttcccctcccggatgtacgtcctgtccatgaatccgggaaactttaacagcagtgactgttctctggatgatatccgggataactgcagctacctgtttcaccgttttcccgcagtctattaccgcgaacattttattgctgtctgcgacggggataaattagaggaacagctcagcaaaattcaggaatttttatacacaaatcacatttatgtaggcatcagccggtgcttccggaggatagaggatttctataaattctaccagcagtctctgaaagccatcaccctgggccgctgtgcctgtccgggcgaatatatcatttactattccaggatacagtatttcgaattcctggaaatggcagattatcccctggacagtgacagtctgtgccacccttatcttctcacactgaaggagtatgataaagcccacaacaataacctttttgatacactttaccagtacattattaatgacggaaatatgcagaaaactgctgcagatttatttatacacaggaataccgtgcggtaccggatggataagatacaagaactggtgcccattgatttctccaatattgctgaaatatcgaatgtgtttatctcttatcggatcatgaattatttgggggagaaggaaaggcataaattatagttttgtgtatgtgaagttcgaggttatgtagtcggcgagcagagcgttgctgacggacggtcaagggaggaggtcttggggccaggggtactgggtggatctgcttgctgctgcgtttctcctcagctaactgcctggccgttcactaagaagctcaggaaagccttcgctcctaagtgaccgccggcagtggatcttcggacgcactccgcagtctgcgcagatccacccagtacccctggccccaagacctcctcccttgacctggcagagactcacttcacattcacggaaaacgggcggggaaggtcgagagttgtacactcttcatcctgtttcgcactattgtccgcttgatgttttggataaatagccacccccctggaacttccccatacccaggtgagaggaattctgcggcggtgggctggctggttcgggcgggagggaggcttaagttccggggacgattccgcaggagtgagtagagagtcttaggcaaaaccgggattcccgcaggagattttttcggcagtcagggacgaaaaaaagtgagcatgggcagagaatgcacatcaagcattctttgcacatacgaacggtgctccggcggggattccggttttgtcttagactctcttcgcgacggaggtgtccccggaacttaagcctccctcccgcccggaccagccagcccgctgccgcgggattcctctcaccgtccccccgccacctacacctgccgtcctgaatcaccttgagccgaagtccaagtgctacccccctaaatcccaattagtaacaactgccccatctaataaatatacctatacctctccacagccctccccatctcaatcacattttcaggcgaacaccatgccggaatgctgtttgagtctgataggatataccctcccccaggtcccagcaaatcaatgcagtttttaacttcccgatcaacctctcccaaaggggcatctttcagaatgtaattaatatccacattccctaccatacagagcttttccccatatgtctccttcagccatctggtatccatagatcctttttctatgggatgaatgccgtaagctccgatatccacaatatcatccaatagcagctgataatttccatcgctgtgataaatccacggcttgcttatggtggatgctgcctttttcatattatccttgaaaaacttcctgaacatatccggggatatcagaagacttgaagtaaatgccacatcgtcgaaggcccagaagaaatcaaagtccaattcactgagatttttgttcattctgcggctccagtctgtaaacatttcaatggttctgggcagcgtctcatcttcatctgcgtagaatgcggcaatattttccattcccatactcaggagtgcaggagaaactcccagccggattctggcgcccatggcgaagtcccctttatagcgttttatcatctcatcaacagatttcagaagcttttcatcgtccggatcaggcatctggatctgtcttagtgcgttctctccgtctatcagtccctgactgacacaagcatctccgtcttttaccacccaattcacaaacatgggaggcaaaacctgtatctgaatagcgtccagtccaatctttttggccgcttcgggtattactgtcaatgccggtactacctgtgcattctctgccggactgccgagccatcctgcattattcagaccgttgtaggtaggctcctctattttgtgtctgactatctgttcctgaacatttatcataacagtgtttaaaataaacggtactttatccggtttgccccctttaagagctgtcacaacacgttccgcattttgcatatgtattcctcccatcaaaacagtaatttcggtaaaaacattgataccggttcacaaaatactgtaattaaaagtgcaattaccagggccgcaaaaaatggccacaattttttgctgaattccccgatagaacagccgctgattccgcatccgatatacatgcacattccgacagggggagtaatcaggccaatacagagattcaatatcataaacacaccgaaatgtacggggctaattcccaaagttgtcataagcggcagcaaaaccggcgtcattaagagcactattgcagttgtttccataaaacatcccagcactaatagtattaagttcaccagcagcagaataataaccttattgtcagtgacagagagcagtgcctcactgaggatagtaggtatgcgctcttttgtcatcagccatccaagcaccccggctgcggcaattataattgtaacctgagcggtttgtttgaatacctgccggcagataggaagaacatcttttaattttagttccttatagacaaatttacctaccaaaaatgcatataatgaggcaattactgctgcttccgtaggggtaaatattccagtcagcataccgcctacaatcagaatcggcattaacagggcccagagagcatccaaaaacgctttgcccctttctttccaggtagcctttggatctttcggccacttttcttttttagctataatcccggttatcagcatcagcatgactcccatgacaatacccgggaaaaatcccgcaatcagaagctgacccacggatacgctggccgtaaccccatagataaccatctgtatgctgggagggataataggcccgatggtagctcctgctgccagtatcactgtgctggtggctacaggatattttttttccttcattcttggcaaaagaacggttcccagcatagaggcatccgcataggcagaacctgagatccccgcgaacagcatacttgccagtatcatgacctgggcaagtccccccttaatatgacccactaaggtagacgcaaattttatgatgcggttgctgatgcctccatgattcataaattgccctgccagtataaaaaaaggaatggccagctgtgaaaaagaatctacgccatactgcatacgctgggccactatttgaatgggcatttccgtctgcagtccaaacactacagctgaggataataccatagctatagctataggtgccccaagcagcatcaggccaaaaaataaaataataagaagtgccatgctcaatcctcccctcctctgctgaatgcgcccttaacatcctgaacaatattccacagggaaaagagaattattagcaaggctcccagcaatacgctaaaacctatatagttcatgggtatgtgcatggcagtagaaaaagatccttctgccacatccatagacgccttcgccgatatagtaagaaaaacagaaaatcccagtattatcacatcgagaataagctgcaggatttttcttatttttatgggcagattgttgaaaataatttcaacgtataagtgcccccgctcatatattagcagtgcagagcccagaaatgttatgtacacaaacagatatcttgcaaattcctccgtccatgtcagcggggagttaaatatatatctcataatcacctgaagcaggacaacaaccgtcatcagcaaaatcattaaaccgcctatccattcaagtccctgtgacattttctgaatgatttttttcatatgtcagctcctttcgaaggttcctgcagtatttacttgtacgacattaccttgtcatataagccgtctccccattcattcaccatatcaggaagcattggttccactgcatcacggaatggctttaagtcaggctcatataccttaaccccttcctctttcatcatcttcagatactcctcttccttttcgtgcaacagatcattctgataatttcctgcctccacggatgcttcttccaatatttttttctgttcatcagacagcgtattgaatttctgatcgttaatcagtacagtcattacagaatacacatgatttgtcataaccagattcttacacacttcataaaatttattgtcgtaaatccaatccaaaggacactccataccgtcaacaacaccttgctgcagtgaggaatatgtctcgttaaaggcaatgattgtaggctttgcgccaagcagttcatacccttttaaataggaatctatttccggcaaacggatttttacccccgcaaaatccggcagatcttccacatccttagaaaagatactctgtcttgtaccccgttcccagttctgagtaaggacgcgcactcccgtcttatccagaaacttatccgcaatttcctgccctaattccccttccgctaccttttttaaatgttcctcgctctcaaacatatacattgcatcgaaaatataatattcaggaagatagagtgccgaaattccagccgcaggaattcccatatcaatagtgcctcccacgattccttccaaaatatctctgtccgcacccaactggctggcaggatagttcgtgatctttatggaacccccggacctttcctctaccagttctataaagtgctctactgcaaggttcgagggagattctaaggctccaatatgagcaatagaaagttctactgtattctctccggaagacgccttgtctgacgcctgggctgtgtcttcttttttcgctgtatctgcatctgatttagagtttccaaagcatcctgtcaaaagcccgcaagtcaacgctgccatacatattaccgcggtaattctaaaaaacttcttattgtttttcatataatctctctccttttcatcttctcaacccagacaccgtatttcatcatttactaccggaattgtgaccgggccttccggcatcactgttacacttgccccagttcctttaattgaaaaagcttttttcacagcttcctctatactgactgcatgaattagaaaaagcttttcggaaagtgcttgatcaatgccgtcacttaccagaattattttatatttttttaatgctctggcaagaatctgcacctgccatttgtctgccgttgacggcggagatgacattttgcagtgcagttcttcaacactgcggcaggaaagaatcaaatcctcaaagtttttatgacctactttttccatgcactctgcagcaactattattacccctccttcctttacaatctttgatgctgtatctatcccttttacaacctggtacaaatttcggtctaatggatagccgttattagtggtgatgacaatatccgttcgttttgccgcaactgacatcattctcttaacatattcacatccgcatgtgtgggctttaaccggatctcccgcaaaagcccccacaatctttttactgcgatccagcgccacatttaatataaatgcaagttttcccattttagccgcctcctggcactctttatgtatgggattgccatctaagttagctcctgttgcatatgggcttgctatattttcaggcctgtgattatgtaatattgtctcttctcctgcaacccccggcagtatactttttcgccctccgctgtaaccggcaaaaaaatgaggttctataaagccctctgagatgattaggtcatgctccacaagaagcttgttcagccaaagtacatttcccgatgacagtctgccaaaatcaactaactgtgtacgatccgaagcattatgattcactattctgtatttgctgcagatttcctccccgaattgttcccgcatttcttcttctctcatctccctgtggagaccattggcaatcaaaatagtaatatcataatacctttcatcccaataaaaactccttatgatagcaggaatcgttattttacttggcattggacgagtattatcattggttataatcagaattttcttcacgccttttgtaagttcttttaaacttatagagcccattggatgctccaaagcttctcttacaatcacttcctcatcccgttcatttagaacaggatttggttctacgagctggacactgcccaatttgttcagatccagctcaataaatcttttcccataaggtaatttttgcacacgtcccataatttaaccccactctaattttctactttaatataatccggtgcaccttcctcgttaaactgcttaattaaggccagttttctctgctctacatggttctccataacaatcctggctttctcctcgttatgttctctaattgcttccacaatctctatatgctgttgtaaagaactttctactgtagagaaagaaagattgctctgtgtaatataatttttaaggatatctttaattgttttgtaggtagcagacataatgtgatttctggacatttctccaatcatctcatgaaataaaatatccaattggttaaaacggttggtatctttatgattcaccacctccctcattttccgcaacagctcatctaaagtctctagttcttcttccgtccgatttctggcagcaagtctggcattcccagattctacaaacagccttgcatcatagatttggctaatccccagattatccaatacaatagcagagaaaagtggtttcatcattgtgccgaagtcaattctgtttacaaaggttccctctccctgctttattgttacaaccccaagcatgttaagctttttaaagctttcccggattgtcacacggcttacgccaaaataatccacaaaataatgctccggcggcagcttctcattctccgagtactcacctctgctgatcattgataatatttcctctactacaatatcacatttcgtttttgcctgaagcatccctgactttttccctgccatatcatcaccatccaagttcctttataggccgataatatcataatacctttaacgtgtcaatatattttgaactgttctctataaaatgtaacttatcagactatagttaacgcttactgtattatttctattctttatttgtttttccgcacacccttcttaaaaagggacaggccggatcgatttggggacgtgttccttttagaaagaacacgtccccaaatgcaccaaacttattatttattcttattcacaattcttgtctcgtagtcccctgtagtaatatcaataaaacgtacgaacagggatactttattgtcttcattcaggctggtccataacgtatcggtaaaggcgtcaatgtcatccggaatatcaaccagggtgggctctccctcaaagcttgggagaggattgccgtcacatttatatgtatggataaagtgtccttcccctgctgctgcattttcataagcaaaggtataacggttgcaggagtcagggtttccgttgttgctttttaagatagacattgcatagctgtatgttccgttttctacatgcataacaccggagatcctgggggtataattgggtgcgtccggctcaaattctctggagcggagagactgctcaaaggtcatctgccgatccattccctcgtagattgtatctgtctgatctccgtttgtgacaatggtcttattgcccagcactcttacaggtgcatagataatgagactgggatcctgcattttagaagggtcgtaagcctgggtgcggattccctccccgtcttctacgaagatacggtttctgctgttctcacttcttcccataataaagtaagctgccactgcctttgttccgtcagcggatcgtccaagaacaataccgcgtcccggatatgcattttcctgtaattcctttgcgattgacaccatttccataaatttctctccttttttgcatttgttggtaatgttttcatgttctttttataataccattccctgtgaaggaataatatgcagcaacacaatcagcctaacctaaagccccagacgctttctgaatttattccacacctgcacctgaaaatattcgtacgccctgtcaaatataaacaaaaccacctgaccgcctgcgataaaagccagcattactcctccgtgcacttcccctgcaaataagagtttgggaaagaagtacagcatgggaaggtacataacattaaaaaccagatatttcataatccagaaaaccgcttttctgttttgaaaccgtttggtttttcccagggccacccaggatacctctaccatcaggacatagaatcccatggctgcgaaggtaatacagtacagcttgttaggggcaaccaatactcctaatataatggccgcaatataaaatgccactcccatccgcagattaaattcacggatgataattcccacaaaaaaagatgcggcagctaaaagaaacagtgtattagtctcaatgatgccgctgagcacaatgaatactaccgcaagggccagcgacaggcccccaactgccatcctctttccttttaaatacatggacagagatctcctcccatacattcacagcaactgtcagcacaccacaaatcacagcagaaattcccggtagaatatgccggccggccgcccccgtagctgttcgtctgatacctctgagaactccactggagctgattcagaaggttcgtatattccggattgttgggttccatattcacagcctgacgggcatgattcaaagcctccacattattcccgattcctgcattggctgcagcgctgcagtagtaccatctggcacttcttctgctcatccgggtcaaaacgttcagggcctcccggtaatggcgggagtttatataattcacagccgcattcagctgtaccatatcctcactgctgtcctggctgtagcttgtgccggcatcctgataaccgctctgggaataccctgccccggcatatccgccctctctgtctttcataatttgatcgtaggcttcctgcacctctttaaatttctcctccgccaggtctgccagaggattatccacataagaatccggatgatattttctgcttagatccctgtaagccttctttacttcatcattggaggcatttggtgagattcccaaaatgctgtatggatcatttaccatttttttgttcctttccttctttcctgtctttttgaattttatcatatttagtccagacgcctgcatacaggatattcctcaggatatccgcgtctaacaggcagggcagcttttcaaactcactgctgcattctgccatcatcatggtcatcatctgccggcactcttcttcatagacttcattttcttctttttcataaaggaaattcagaggattgtaatttcctttctccctgtctttttccaaatcatcataggcatccataatgtagataaatttccccagataaaaggcaagccttctaaggccttcctcccactgatcccttcggtagataaagagctcttccataagccttccgaaacatcctgccactttatcaatacttgtctcatttgcctcttcacagcgggacagttcttccagacaggtgtaaattttcttacattttttcggatattttctgatgaccccggacgctttgctttttaaagcatgaatcccggagagaccggttagttttctttcatccttccagtcatccaggaaatgataataggctaaaagcagattcatctctgcggcatattccgtaatttcattctggagcatcccggtctttttcactggatgcactttacagtgtttcatagacatcctggactcactttcatacaaagatgtcaataaaagggtaacaaaagtaaaatcatacgtcagagtcatctgcccagtaaacccgtatttttctttcaaggtctggcacaggccgcagtagtatgctttatacttatagtagtcctttactttcagctcaggtttataaatcgtaacatatccaaacatctatcagttctccacttatttttagcctttataccggattatactacataattatttaaaatacaatttaggacgtcattttttcataaaaacaacgtcctaacctatttttcttctgctattttataagttctacttctaccggtatggatggatctaccgtttctcctgccaaaatctgaagtgcagctgcaacagcggtttcccccatcttgtcaggcttctgagcaactgttgctgccatcttccctgcttttacagcctcctgggcatcatccgtggcatcaaatcctaccactttaatatcttttcctgaggcggcaatggcctccacagcccccagagccatctcatcgttgtgggcaaataccccttgaatactgctgtctgactggagaatattttccattaccgtcatgccctccgcacggttaaagtttgcagtctgacttgccaccacatcaaaagccgtatctgccacctgatggaatccctctcctctgtcaatagtggcagatgcccccggtacgccttccagttccgcaaccttggcgccttttccgatgagctcttccagatactcagttgccattttggcacccgccacattatcagacgcaatctgacagtcaacctccactccgtttactacccggtcaacggcaatgaccttaatccctttggataccgcattttttacagccggggcaactgcgtcggaatccaccggattcacaattaatacccctacatttctggagattaaatcttctatgtcactggtctgcttcgccgcgtcatcccctgcatctaccacgatcaggtttgctccctcttcttccgccttagctttagccccgtctgccagagatacaaaaaatggattattcagggttgagacagaaaagccaatggcattccccccttttgcagaaccttctgaggtatcctccccatcgatcgtaatcgcattgcagcccgcaaggccggctgccaaagcgatggctgccgcaaataccgcacattttttaaggaacgtaaatcttttcatgagttcttccccctatctttttctatcagataatacagctacaagaataaccaggcctttgataacatcctgatagtaagaggatacccccagaatgttgagaccgttgttcagcaccgctataatcagcacaccaataaatgttccgtaaatcttacctcttcctccgctcatactggttccgcccagggctaccgcagcgatagcatccagttcatacccatcccccagtgtgggctgggccgatcctaatctggagagaagaatcagtccggagagtgctgccataaggcccgagataccatacacgataatctttgtcttatgtatatttacccctgccagcttcgcagacttccagttgctgccggttgcgtaaacccgtcttccaaacgttgtcttgttcagcagaaagaagaagatcaggaaaataagaatcagaagaatgactgggataggtatatgataaaagttcccttttcctactaatttaaggacaaagctgtcacccagattggaaatgggttttccattggtaaagatcatagtcagtccccggtacacggtcatagtgatcagtgtagcgataaacggctggagacgtccctttgtaaccaaaacaccgctgacaacacccagggcggctcccaggataagagccagaatcatagccagacctgccggaactccggctgtaatcatacctgcacacagagccgtactgagcgccagcacggaacccacagacaggtcaatggcatctgtgagaattacacatgtcataccaaatgcaatcagtccgttgatggaagactgacgcagcagtgataaaaagttggaccaggttctgaattcagggcttgcgatactgattcccaggattaataccaccagagcaatcagagctccgaagtcctgggcatagtttaaaacttttttcttattttcattcattataaggtacctcccgtagctaatgtcattactttttcctgatttgcctcttcctgagcaatgattccccgaatcagcccttcccgcacaaccataatccgatcgctcattccaagtatttccggcagttctgatgataccatgataattgctacgcccttggctgccagctcattaataatactgtatatttccttttttgcgcctatgtccacacccctggttggctcatccagtatcagaattctgggattcgtataaatccatttggcaaagactaccttctgctggtttcctccgcttaaattattgcattcgtggaaaggaccaaagcatttgatgcggagctcttctatcgccttgcccacaagttcatcctccgccgctctgctgataactccggcctttcctgagatccgccccagatttgccagggagatattatttttgatgctctcttccagcataagcccctcggtctttcggtcttctgtgataaaaccaatgccttgctccatagcgtgaagcggattctttatcgtagccttccggccgtcaatataaatatttccctgatcccaggacagatttccgaagatagcctgcatgatctccgtccggcctgcacccatcaggccggatactcccagcacttcaccggcgtgcacagaaaagttcacatcctgaaacactcccttttttgtcagtccttcaacccggagcatctctcttcctatggtaacctcccttttcggataacgctctccgatttcacgccctatcatcattttaacaatttcattcatattcgtctcaggaatgttctttgtccctatataggatccatcccgaagcacggtgatcctgtcgcacaattcaaaaatctcttccatccgatgagagatatagacaatagacaccccttttttcctcaaagactgaatcacctcaaaaagcactgccgtctcgctctgggtaagggcagcggtaggttcatccataataatcaccctggcatccaccataagggctttgcagatttcaatcatctgctgctgtcccacagaaagctcagacattacccgatcaacgggaatctgaaccccaagcttttccagggttgcttccgctttctttctcatggccttctgattgcacatccccagccggtttctaatctctctgcccagaaacagattctcttccactgtgaggtcaaacagtacatttaattcctgatggataaacacaatgccggctctctcggcctcctgagggttcttaaacagcacttccttcccgtctacggttaccgttcccccatctctggtatacactcctgtaagaatcttcattaacgtagacttgccggcgccgttttcccccattaatgcatgtacctcgccgggagccagcacaaacccggcatccttcagcacctgattctgtccaaaggatttgtcaatccccttcatctctatctgcatggcaacttcctcccttccttcttgctgtcctatacagcattctaactacgaaaatatacagccagactgcaaaataatattcgcatagggcgttgtctcaccggtacgaattactgccctgcattgttttgtctgcttttttagttcctcatgggaaacaaactccacgttgaaaccggtttctataacctgaaaaagttccttaatctccctcagaatagctggattcttttcttttatttcttcagccaatacaatcttttctactttcatgtcttctgaaaccgctttcaaaacttccataaaaccaggttttcccaaagtcagcgccaggtctattctctccgtctcatcggggacaggcagaccacagtcccctactgcaatggtgtctgtgtgtcccatatagctgagcaccctggatatatcgctgtttactattccatgtttcttcatcctttttcctccgctttctctgccggtatctatttctcccataagaaatctataccggccttagattttaccttttatgcttccatttccttgattacttcttccagagtaggcataccgccctgtgccccgaacttttctgtggacaggctggcagctgtattggccagtttcagtgcactttctatatccctgccttttgcaatctctacggtgaaagctccgttgagcgtatcacccgcccctgtggtatccactacatctgcctttctggctgggaccaggagaatctcaccagtttttctgcaggtaataacacctttggagcccagggtaatcacaagcttttccggatattttttcaggagatcttctgtggagcactcatttctaaataaaatagccgcctcgtgttcattaggggtaaggtaggtaaccttttccagaatcccctgctttaccggccttgcaggcgcaggattcagcaccactttaatcccctgcccggtgcagatgtcaaccacatattctacagtctcctgaggaatttcatgctgcagcagcacgatatcgcactggaaaagttcctcttttatactgtccacatatgctctatccacgcagttattagcgcctgccaccacgataatggtgttgtcattctctcccactgtaatcagggcgatgcctgtgggaacatccttcacaattctgatatgaccagtactgacacctgcctcctgcatgttctttatgagcttctgtcctgcctcatcatcgcccacacatccgaacatctctacctctgctcccagctttgccattgccacagcctgattggcccccttgcctccggggatataatgaagctcgtctccctttaaggtctccccttttagcggaattctctccgctgttactgtcatgtccatgttaatacttcccacaactgctgttttcattatatttactccttttctttatttattcaccggcttatccacggtggtctctctcggaatcaatcttaccgggaacacattctgccgccggatctctcttccttcaatatgatctgtaagtaccttgaccgcctcctgccccatctgggcaatgggctgttctatggtagtaatctcaggggtaaacagtctgctcagatttatattgtcaaatccaatcagctgaatatcctggggaatccggtatcctttctttgtcagcactttgtatacggagatggctaccatatcatttgccgctataattccatcggtctccggataattctctatgagttcttccgccttttttaacccgtcctcataatcatactcacactctaatgtaaccgctgtcacgtttctttctctgcacacatctgtgtatccctgaaatctctgtctggcactggaaaaacggcttgggccgctcatctgcacaatgtttctgcatccacagtccagaagatgttccatcgccatgcggccccccatataatggtctgactggatgtatgcaatctcacttccggttcccacctgacggtccagcataatgaccggtatctgacactttcttacttcttcttttatctccttctgattcgtcataagtatgatgccatctgcattcattctgctcaggagattcatattccgtttttccttttccaaatcattattagaattgcataatgtcagtcgatacccctttttgtcacactcctcttcgattgcccctgccagttcattgaaaaatggattctcgatatttggcacaatcacccctataatcctagaggactttttatataaggagcgggctacctcattgggtttgaaaccggtttcttttatggcctgctcaaccctctgccgcttcacactgtccacattcgctgttttgttcattactctggatactgttgccggagatacccctgccagctttgccacatcccgaatacttgtcattttgtactccttttatgtcactttgttatttgaaacccgtttcaagatgattttattataaatcctgacgatatatctgtcaatgttgattttccaatttatactttttttgctgttttgcataaattttataaagcttcttcctacttaaccactgattttttatgtacttttcataggatcagataaaatatatctgcagacaaaagcaagatgggcatcgactattatttatcgatacccatctcactttgattcttcaatcattcttgtacctctttctctataaaaccttttctcatctttcactaggattatgtggttgacatcacctttctccattaaaaagtataagtaaagttttacagttctttgggtttgttactttaaggttttggcggtccgtacctccttatcttaaattgaataacaaaaggaataaagcatttaatctgttatttatttcttttgttattttatattgttatattaacccttttatacaattttgtcaatacttatttatatttttcattattttatctgtttattaaccagatacactactttatacatggtgttggctgacatgcagtatatcttgtaatatcccggcggaaaaactataattataaaatatatgagtatgtaagggaatataaccccactctttcccttgttcctccttattcttcctctggtggattttgttctacctgaagatggagcaaaacaaaatcggaaaatttattgctgcccgcagaaaagaacaggatatgacacaaatgcagtttgccgaaaagctcagggtgaccaataaaatgtattgataatgtcactacaaaatgatatacttaatatatatagaattcaatagttatttgactatatcaggaggtatttttatggagaaaacatttttacaggtgcgtactgatgctaaagataaggaacaggccagtgtcattcttgaagaacttggaactaatttgtcatcagttgtcaatatgttattaaaacaaattatattaacaaaaagtattccttttgaaataaaaattccacgtttatacacatctgaagaacaggtttccgaagtcagtgcttcaatggcaatggaacaaatgccgctagacagggaagatataaaattgttgaaagaatatcagaaaactaaggacaaggacactatcaggcagcagattttggagaactataaggagtgataaatgagtgataaaatctactgctatcctaattcagatgttttgattaacaaattgaacgttcaagacagtgataagcttcccgaagtagaacggaaattgacaatgcttcattaatggatttgctggagaaaccagtaacaggtaaatttgattttgagcacttgcgaaatattcacaaatatatatttcaagatatatattcctgggctgggaaaatccgtacagttgatattgcaaaatcaaatatgttttgcaaagtacaattcattgaaatgcaggcaagtgaactatttagaaaattacagaatgatgattatttaaagcgactctccaaagagaaatttgttcaaaaagcagcctattatttttcagaaataaatgcactccatccatttagtgaaggaaatgggagaacccagagggaattaatacggcaattagcatacgaatcaggttatattctgcattttgctgtcatttcttatactgccatccagaaccattgcagaccggtcaaagcggcaatggtttcctgccgtcttccgcttgtacggcgcaattctatgtattgttagcgccctattcatttatgccgtattgtcagggaaaatcgtattgcctttgtttaagtaaaccttacacacgacggtaaaataaaggccgtcgtgtaccctgtcacacgtgataacagagtgatgatggtttacaatggcttatttttcctcctgatcctcataaatcttttgtacatcttttgagatcatctttgcaatctcgtccatatccaaaggattctcatacccatcccggattctgtcctgacggttctcagaaagacaagactcttccaaacgctcgtcttccggttccgaatttaacttgtttcggtttgaagtttgaggcctctcagagtttgttccgctttttttcttagtgcctcctgttcccctgctctgccggctggtggaagtctgaacattctctgaggtatccgcctttccccgcttcttcttttttttcttcctgcgggtaggcaggtaatcccttaggctcctcttttttctccggctgcgtccccggcttttgccgtctctgtgaaagagggactgggaatctttttcaaactcctcttttcctctcttagtcccaagctgatattgaaacaggatccccaaagctgcaaggatcagtcccaccaacactgcaagaatccccgcctcccggccggtcattgtaaataaaagcctggaagctccaaagcctccgcagattcccgttgtcagaatcacaataattctctcatactggagcgccagaacacctaccaccactcctgcaacgatgcaaatccctctagccatagaggtatcggctgagaaaagctgtccaagcatccaataggtcagccccccgcacagaacaaagagtcccagacgatagatttggaatgcaaataccgccaaaagaatcgctccgcctgcagcaatggcagctgacagcttcacatcctttaaaaagtaataccccgcagcacctcctgctgcagcacctgccagcgcacctaccagggtaatccatacctttctcagtttatacccgaaaaaacagttcaaaagtgcgaatacaattcccactgtcatcagtatactgctgtacttattggtcaatccccccagatctcccaaatattttcctatgtagttcatgatttcctcccttcgtaaagtgcttgtgcacttacagccgatgatgctcccctgtttttgcaccggcattatttatactcctgcaaatggcccccatctgcttctgccttctaagcagaatacagaagcaaaggttccatttattcaacagtttaccctataaggagaaaaatttcaatcttaatagtattcctggatatcgttattcaattttggaaaaaggctttttaagggctccccctcaagcgctccgccgcgtacgattgctccccgggtcagtaattcttcaaaagaggaggagcccatcagcagctgtgtaaagctttcaattcccatacagtaatcccactggacctcctctccaagcctctgagactccttctttccgtccgtctcccaaaacttgaatacggcattattccactccagaagctcatcctctatacggatgatcacaggttctttcatggcaagaactgcaaactcccgccaggcctgtattacatccacaactctcgccatcagaaaaggctgtaaggtgcatacacttctgccgggattcagatagcaaaatgttgtatccccgctttctgccgcccactctgccttaacaatatgagaacggtgtccgtaaatgaagtccagacactcccgttttgcctgctcgcctgtatatagcatctcatggatgcgcatcaccgtaccctctatagagtataccatatatgcctgttggacttccttcccggaaaggacatagcagactgcatgttccaattcccagctttccgttagaagctcccattgctcctcccctcttagaataccgccgtttctgccgatctgataggattgataaatgttctgcatcacctgaactgcgtccttcatccgtacccggcgaaaggtcccgtgttcctgtgccgcccttcccaggtgcggctttctggcatagtttaagtcccaagggtctatcacatagttttgtttaaaatagcagaaagtccactgcagaggaaggtagaagtcaggcgagaatggcatcagaaggctgatacagcgcttttctctgcgcatttcttccatactgtacttcaggagttttcttcccactccgcctctgcggtattccggagcagtatccagccccaccacataagaggccctcatttttttccctcttactaagagttcatagggaatcatctgaacacttgcggtcagatccccattaagaaaagcgccaaaggttctctctgtcctgtaatatctgctgaaataccattctgtaaattctctggtatcagtgaagcagtattcccacagtcgcttcacctcctccttatcttcgtccgatgctctatgacagtaaagtgtatctttctcctggtactccgccttccatttcctggcaaacgcagcaggataaaaagaaagcttcgcttttctcagaccttcatctcccatatcctcttcccggtttacatacaggatatccggccattcatgaaggagatactcctgatgaatcaccccgtataaaccaggtatctctacgtttgctttctctatatgaatcagaacagtgtccttattcagctgctctcctatggtaaatgcttcaatttttccatttaccctcatagctccccctgtgcattttagctgctcccaactggaaaaagcttcataaatggcttttttttcgcagtacagctctctgtcaaagtcgctcttgcactgccggtaaaagcaccagcgctccaaaaattcttttacctccggaatgttctccgcggtaatcttctcatatccataatctgaatatcgttttttaaactggttgatgtgattgcgcttaccgtgatatttctttccttttaaaagcctgagatcttctccccggtagatataatcaaatatttctctctcctcctccatccagaaccagccgggcacctctttcttcagtgcttcagctgccgcttccggaatggcccggattacaaatggcatggctttttcctgaaaatatactttcagaagttccattacttttttcaaatctccatcctgataattaccgaacggcggtaaaatccagctttttcctctgaccgtggtcagaatcaccagatacccttccacaatcgcccactggacatgatagcattttctccatataaataaatttgtaaaactgcattctgaattatttgcctgaagtctctcaaagtaactgtttatcatatcctgatcctccagggtgagatcccgaaatgtaaccataatttcctccaatcccaagtatgttctacttaacagcttaaccagattaaattttccttataccataagaaaaagaacttcctgtgagcgtcacagaagttctttttctttttcttatcttctatatctgttttcccgcaaactgggaattgtaaagctgttcgtagaacccatgtgccgccaaaagagacgcatgtgttccctgttcaacaatatttccgtcccggatcacaagaatcatatccgcatttttaatggtagacagccggtgggcaatcacaaagctggttcttccttccataagcctctgcatggcatcctgcagtatccgctcgattctggtgtcaactgaagaagtagcctcatccaggatcaggatatccgggtcctttaagatagccctggcaatggttagcagctgtttttctccctgagagatgttacttccttcctcgtcaattaccatatcatatcctcccggaagagtccgtataaagtgatggatattagccgcctttgccgcgtcgatgacctcatcttttctggcatccagacgcccgtaacggatattatcaaatatacttccggaaaacagccaggtatcctgcagaaccattccgaagatattcctcagatccctccgcttcatatctctgatatcaacaccgtcaattcgtatgctgcctttgttcacatcgtaaaagcgcatcaaaagattaatcaatgtggtctttcccgctccggtaggccccacaatggcaaccatctgccctttctttacctcaatggtaaagtcctggatcaccgggcgttctctgtatccaaaggagacatggtcgaaggtaacatttccctccgccttttccaaaatcacaggcggatcggcctccttcacctcttcctcttccctgagaatcccgaataccctgtccatggccgcaaaggctgcctgaatctgggcagacagctgggaaacctgagacagaggatcgttgatctgccatacataacggataaaggcctggagattccctatggtaatcacgccgcttaacgcaaacagtgcaccggttacagctatagcgcctatggtcagataagtaaccagtgagattagaggggaaagcatggaggaaaggaactgggcggaaaaagcatgcttccgcagtctgtcgttgatctcctcgaattcccttacagagtctgcctgacggttaaacaacagaatctcccgaaagccggtgtacatttcagtaatagcaccgttcagctctcccatagaattctgctgggcattaaactgcttctgacttttttttatgataaacctggtaatcagaagactaagagggataataaccaaagccatacacgccatcacaggctgtatcgtaaacatcataacaattgccaggattaaagtgaggatcccgttgatgatctgcatgaaactctgctgcagtgcattagatatggtgtcaatatcattggtaatccggctcagtacgtccccaaagctgttggaatcaaaataccggaccggaagtcttctcaccttatcctgcaccgcatttctcatatcgtgcatagcattttgtatggaattcgtcagcataatggcgctggctgcctgagccagcgtttttacaagataaatcacagccagcacggccaggatatgcaatacggttttaaaatggacgccggctcccggcagtttctgcatgagatccgaggcatcctttgccagctgtgttgtaatcataccttctattcttggagctgtagtcatagctgcaatggagatgattcccataagtacagctccccagaacccccacttgtaaggggcgataaaaggactcagctgtgcgatattatcttttaatttctgtagctttttatgcattcgccaattcctcctcactcagctgggagactgcgatttcatgatagatggagcaggatttcagcaattctctgtgggttcccatccccacaatctttccttcgttgagcacgacaatctggtctgcgtccataatgctggcaatcctctgagcaactaccatgacaatcgcattccttgtctccttcttcagttctcttctcagggtcgcatctgtcttaaagtccaaagcagagaaggaatcgtcaaatatataaatcttcggacgctttaccagtgccctggcaatggaaagcctctgtttctgtccgccggagatattcgtggcactctcagtgatattctcgtcaaagccgcccttttccataataaagtcataggcctgggcagtccttgccgcctgctctacttcccgatctgtggcgtcttctttgccgaatcggatattgtcggctatggttcccctgaataacatggttttctgaggaataaagccaatggcatccctcagggaagccagattaaaatctcggatatccctgccgttgattcgaatactccctccgctcacatcatacgctcttggaatcaaattgataagcgtgctcttaccggaacccgtgctgccgataaaggcaatggtctccccctttttggcagaaaaggatatatctttcagaactgcttcttctccgtctggatagacaaaggtaacgtgatcccacaccacctcttccacttcccccttgagagggatgccgtcttcctgattcttaatggcaacctcctgattcattactttttcaatccgttttgcgctgactcttgccctggggtacatcatgaataccaggcaaaacagcataacggaaaacatagcatggaacagataatccataaaggctaccagctgcccgatttccagatgacccgcatgtatcatattggcagctacccagaagatacccatcccagctatattcatcagaaaaaagaaaataggctgtgtcagggacatgagcttgaagagctttttcgaatacttcatatactgattattcgcctcattaaacctcttctgctcatatggatcattgttaaaggcccggatcacccggattccgctcaggttttccttggatattcggttaattgcctccatggacagctgctgattctcactgagcggctcggagatttttgccaccaccagcaccccaatgataatcaccggaaccgtagagataatgatcagggacaggggcagagaagtccgaagtaccaaagtaaagctaacgaatatcatcacaggtgtcataagtgctgttctaaatagaatattcataaacatttgaatctgaaacgcgtcattgttcgtccttgtaatcagtgatgccgccccgaatttttgatactcacggttggaaaatccctgaattttacgaaacatatcattcctgatatcgcaggtgatccccgtggagataaatgcacagcagtatcccatcaggatcgttcctcccactcccacaatagatatgattacaatcactccccccatctttaaaatataagacggatcgtttgtggtcactcctttgtcgatcatctgggccacgatagtgggaatccccagttccactaaggcgaagccaaagaccgagagaagattcagcagaaagacttttttatagtttttcagatactttgctatgagtctcatttttcttcctcccttcttttctcacagaaactctcaaaagcggtcaaaaaaataggcacatgggaaactgaaagtttctgtcctgcaccctattccatcagatgaagccactttatgagtagtagttctattataacgagtattcccatttattacaatccctgaaatataaaaatccggtaaagaaaaggcgcaagccctctttctctaccggaaatcagtttatcttatatttttgtggaattcctgaagtgactgaacagagaatttaccggctttcgccgccctgattccttctaccgtcgccttggcttcagccatggttgtcacgtatggaatcttatacttgatagcggcctttcggatgtaactgtcatccacggcacccttcttgcccaccggagtattcactaccatagaaatcttctggtttgtcatctcatccagtatattaggccttccctcatttattttagcaatcttcttaaccggaattcccgcatctgcgatcagttcctgcgttctgcctgtggccataagcctgaatcccagttcatgcagtccccgggccacctctgccacctcaggcttatccctgtcgctgacactgataaggacagttccctccagaggcagttctgtctttgtagcttcctgcgctttgaagaacgcctccccgaaattctcagccattcccaggacctccccggtggaacgcatctccggccctagcagagggtctacttcctggaacatattaaatgggaatacggcctctttcaccccataatgggagaaggtcttttctttcaattccggaaccggagactttctgccggtaaggtgtgaagtcataatatccgtggccagcttcaccatcttaatgttgcagacctttgataccaggggtacggttctggatgcccttggattggcctccagcacatagaccacaccgtcctcaatagcatactgcatattcataagtcccacaacattcatctcaaccgcaatttttctggtatattccttgatcgtttccacctgttctgcggtcagatttttagaaggaagtatgcaggcagagtccccggagtgaatcccggcaagctcaatatgttccataacagcggggacaaagacatctgtgccgtcgcttatagcatccgcctcacactctgtggcatggtggaggaaacggtcaatcaaaataggacggtccggtgttactcctaccgcggccttcatataataagtcaatgcctctgcgtcgtgcaccacttccatcccgcgcccgcccagtacaaaggacggacgtaccataaccggatatccgatcttctcagcaatggcaagcgcctcttccacgtcaaccgccatcccagcttcaggcataggaatattcagcttatccatcatagcccggaacaggtctctgtcctctgccatattaatggtctcaggagtagtgcccagaatatttaccccggctttttttagatcttccgcaagattcagaggcgtctgcccgccaaactgggcaatgactcccaccggtttttccttctcgtgtatactgagcacatcttccagggtcagaggctcaaaatataacttgtcagaggtatcgtaatccgtggaaactgtctccggattacagttaacaataattgtctcgaaacccagttcttttaacgctatagccgcatgcacacagcagtagtcaaattcaattccctgaccaattcgattgggacccccgcccagaatcattatcttgggcttgtctgtattcacaggactctcatcttttatatggtagctggaatagtaatatgcggcatctttggttccgctgacatgcactccttcccacgcttccacaatgcctgcctccgtgcgggctgtacgaatctgttcctccgggacttccagaatctggcccagatatttgtcagaaaatccgtccagctttgcctgacgaagcacatcagcagcaggaacctttcctttctctgcctttaacgcttcttcctcctctaccaattccttcatctgctcaataaagtaccgcttaaccttggtaagttcaaaaatctcctctacagacgcaccttttcgtagtgcttcatacataatgaagtggcgctcactgctggggattgccagcattttcagaagttcttttttgctttttacagcaaagtccctggctccccccagtccggctcttcctatttccagactgcggatggctttctgaaaggcctctttataggttttgccaatactcatgacttccccaaccgcacgcatttgtgtgccgagtttatcctcagcgcctttaaacttttcaaaggcccagcgggcgaatttaatcacaatatagtctccgccgggtacatatctgtccaaagtaccatatttgccgcagggtatttcatccagagtcagtccgctggcgagcatggctgagacaagagcaatggggaatccggtggccttggaagccaatgcggaggagcgggaggttctcggattgatttctattacaataatacgatctgtaaccggatcatgggcaaactgtacatttgtaccgccgatgacttcaattgcctccacaatcttgtatgcctgttcctgaaggcggtcctgaacctcctgagatatagtaagcataggagctgagcagaaggaatctcctgtgtgaacccccagaggatcaatgttttcaatgaaacatacggttatcatattattcttagcatctcttaccacttccagttcaagctcttcccagcccagtatagattcttccaccagcacctgtcctaccatgctggcctgaaggcctctggcacacacagttttcagctcttccacattatatacaaggcctccccctgcacctcccatggtgtaggcgggacgcaggacaaccggatatcccaatttctctgcaatagacagcgcttcctccacagaataagccacctcgcttctggccatctcgatgcccagaccagccatggttttcttgaattctattctgtcttcccctcgttcaatggcgtctacctgtacgccgattacctttacattatatttctccaatacacctgcagctgccagctcggaacaaaggttcagcccagattgtcctcccagattgggaagaagtgcgtcggggcgctccttctcgataatttgagtcagcctttttacattcagaggttcgatataagttacatcagcagtctccgggtctgtcataatggtcgcgggattggaattgaccagtacaatttcataacccagattttttaatgccttacaagcctgagttcctgagtagtcaaactcacaggcctgtccgatgataatcggtccggaaccgattatcagtactttgtgaatatcttctcttttcataaagtagtgtatctccttttctctctagataatagtagtttaccatgagatgtttattaacgcaatcaaagggaatgaaagttgctgtagattatatccgtcacagaaagtttttttcgtaccatatgtatatatatgcagataatatattgcattccgctaaacaaagtaataaaatatatagaaaacagatacaatttctctaaatcggttcaaatagttttagttaacaggagatatataaaaatgtacaaaacacaaaatagtgtatcccaccgccgcaggccagctttcaccccaggaacgcagctatgtattctctctgttattttaattatcattattgttttaacactttggaatacttcaaatctgcggtccgtgctcaactacagtacagagaattatgcaaaagatgttacctgtcagctggcagacgatattactgcacgcctggagagtaatcagcagaacatgatcctgcttgcagactccatatccagaattgattacagtacaggtactgaagcactgaaggaatttcttaacagaaaagcagagattttggactttgatattctaatttttatagattcccggggaaacacaattccttctgtatctgatgctcaggatctttggcaactgcccagtgtccaagaatccctgcagggaaatactgaggtagcctacatagaaggacagagtcttctctactccactccggtttattccggcagcgagattattggtgtcctgacaggaatccacaggaaggaaaatattcagtccctgattcagcccaaggcattttcaggggaaagcctgacctgtatcattgataatagcgggaaagtggtagtctctcccacagagttaaaaccttttctacaattagatgatatatttaaaagcggaaaagacaggaatacagaaaatgaaatagttaaaatgatggacaatatgaagtcgaatagggatggggtcttcccttttacagcagtaaacggtgatgaactgattatgtcctatcaccctctcaatgttaatcaatgggtgcttctgactttaatccctgcggacttgatctcctatggggctaacgtttatactgtgaagacattccttattatcggaggcattgccgttgtttttattctattcctggcttctatactccgattttacagttaccaccggaagcatctggagcagcttgctttttctgatccggttacgggcggtatgaattattctgcatttcagcttcagtatgaggaactagttaaagcagctcctcctcttacttatacgcttatcatgcttaacgtaaagggatttaagcttataaacgaaaattacggaactgcagcaggcaatgataccctgcgctacatctataagatactgcttcgccatacggaacccggggaatttgccgcccgcagtgaggccgacaatttctttttgtgtatcaaagagcgggagaagcaggccattcagttcagacttgatgccatgattcatgatattaattcttttaacaaaaccagagagactccttactatcttaccattctgcaaggtgcctatctgatagatgatcccacccttgaactcacaattatccaggatcgtacaagaaccgcttatcagaatcaggcctccggcgctcatccgtcatgtgccttttatgatgctgattttacaaggcagctgcagacagagcaggagctcaacgacttgttcgagcagtcactgaagaatcacgattttcaggtatatctgcagcctaaagtcaggctgcttgatggcggtatcgctggtgcggaagctcttgtccgttggatacatcctcaaaaaggaattatctttccatctgattttattcctatttttgaacgaaatgggaaaatctgccgtttggacctttatatgtttgaggaagtatgcagacttctgcagcaatggaatcaaaaggggcagccctggctccccgtatctgtcaatctgtcccggcagcattttaaaaatccagagtttctgaaatcattctctgaaattgccgggagataccatattccccaaaataccatagaatttgagttgacagaatctattttacttgatcctcagcagattgagattgtgaaaaaaagtattcataaaatgcattgtctgggttttctatgttctctggatgattttggttccggcttctcctctctgggcttattaaaagagtttgatgtagacaccataaaactggaccgtcagtttttcctggacatttcgaaagaaaaatcaagagacgtcattgcttgcttaattgagcttgcaaagaaactgaatgtacgcacagtagccgaaggtatcgaagtgcaggaacagctggattatcttagagatataggctgtgatatggtacagggatatatcttctcaaggcccctgccgtcaaaggaattcgaagccttctgcgctgtataaccacatttcccatctctttatacacagaaaaacggcatactgcatgccgtttttcttactctgtacccaggggtatatattggggggcccctgagtatacactataggaggaaaggattataaggttgtcgtaaaaccgccgtctacgctgatgctccagccgtttacgtagtcagacgccctgctggccagataaattatggtccccatgaggtcttccatctcgccccagcgtcctgccggaatccggtttgtaatcttattgtagaaagcagggtccttgcgaagctctgcatttacttcagtggccagaaatccgggagaaatcgcatttgtctgtatattaaattctcccagctcattggcaaacaccctggtcaatccaataacaccgtgttttgccgctgtgtatggaggacagtgcttatcagcggtatacgacagtgcggaacctatgtttataattttgcctccgccctgctgcttcataatcttagaaaccgcatgagacaggaaatataccgcattcaaatccagattgatgcacatatcccagtatttgtcagggtactcatcaaatggggcaaaagcgctggcgcctgcattgttcaccagaatatctattcttccatatttctccacacaggtatctaccacctgctgaatgtaatccttcttggtaaggtcaccctgaaggaattctacccgcctgccttctgcctctaccaactgctttacctctgcagtgtctggtgtaaagtgcggaataaacagatctgccccggcctttgcaaaggctgctgcatatgccatgccaagtccctgattggctcctgtgataattgctaccttccccttcagactaaaaaaatccagggagaaatttccaaaatccgtcattcgtcttgcctcctatcccagcatggttctgattgtcttagcaatacttgcccggtccatgccatagtatttataaatctcgtccggatctcccagtacagagaattgatccggcattccgattcgtttgaatttacccctgtatccggcttcgcataaaatctcggctactgctccgcccagaccgccgttgatggagtgatcctccactgtcacaacgtttccagtggtattggcaactcttaagatcgcttctgtatccagcggcttaattgtgtgcatatccaaaacacctacactgagtccttcttcgcctaaaagcttagctgccatcatggactcatagatacttgatccggtagaaataattgcagcgtccctgccttccagcacatctatggctttgccaatctcatattcgtagtcttccgcataaatattaggtgaaccggctctgtctatccggataatcatagggccttcatggtccatggatttcctgataaccttccggcactggtcagcgtctgcgggaactaccaccgtaaggttaggtatggcacggtataaagccagatccgcaatgtcgttatgggtggggcctccccctgcggtaacaccggaatgggtcccaatcagacgtacattcacatcgttgtacgcaatatcggtatggatttggtctgctgcacgcagtggaaggaagggaccaaacacttgagcaaatacaatgtgccctgccagcgccatacctgcggaggcgcccacctggtttggttctgcgatgccaaagttaaagcatctgtccggatactttgcaaccatttttcctgcactggaggatggggcaacattatcactgtacgtaaacaggaattctcttccttcatctgcaagtttcattaattcttctccatatgcctctcttgcattggataacatctggtcaaaatcaaaagttgtttgtactgccatactatctcaccttcctattcttttctacgtcagcaagtgcttcttctaactgttctttcgcgataccgcctccgtgccatttataattgccttccataaagtcaacgcctttgccttttatggtattggatataatgaaaataggtttccttggagtaaccggatccgcttttggaagcttctccagcgcttcacatacctgaagcatatcattgccgtcctccacattgatgacctcccagccaaaggcctctaactttttatccaatggatccaggttcataacattggctgtagggcctgtcatctgtacttgattcttatccacaatagcaaccagattccccagctggtaatggcccgctgccataattgcctcccagttggtaccctcgtccatttcaccgtctcctaccataacaatggttctccagggtgctttttttgctcttgcacccagagccatacccacagcgacaggaagtccatgccccagtgagcccgcggatacttctatggcaggcacatattttctgttcgaatgcataccaaattttgctgtgtcaagggtttcgaagtgctctaccatgtagtccatggtatacatgcccatatcctggaaaatcgtatataacgtctcgctgcagtgccccttgcttaacacaaagcgatctctgtcctccatcttcggatctgccggatcataattcatatattcatagtacagggcgactgccatctcaacaatggataattctcctcccagatgccccattccaatgcggtagataaagttcaaaagatcctttctgatttttaaacacttatcctctaattcaattacacgtttcatttctactgtactcatttgatagctcctttccagactttctttatatgtcctcgctgcatttgattaatattttcggatacttcccggatacctgggccctgaatgcttcctctgcctcatcgatggagaaaatcttgctggtaaaatcggaaagatcatatttggataagacctgcaccgccctggggaaggtatagggggccacataaaatccggttactgtcagttcattaaaataacagtatttatacagattgaatggcatctcaaaatcatttggatacatagcaccgtagatcagctttccgccttttgccgtaattttcggcaaatcatataccgcttttacagaaccggaacagtcaatcacggtatcaaaacctcttccgtctgttattttcattgcctcctccactgtgctggaattcacggggtcaaccacatattccgctccgtatttcaaagccagctctcttcgctcagggataggctctatcaaggtcaaactggtggccccatacatttttaatgactgcagtgccagtagtccgatagggcctcccccggatatagcgattctctccccatatctgggacttaccttatccatcagacggacggcaatggaaatcggctccagcaggcatccttcctcaaggcttacatcgtcaggaagtttatatacctgagattcatgccagacaatatattcactcattcccgggcggttatactcatctgcgtgttcacagaactgctgctgtccgttctggcagtaatagcaagtaccgcagaacctgaggaaattgccggcaacccgatcccccacttttaaccctttctgcgttgttttttcccccagctccacgataacgccggagacttcatgcccaaggccaaaggggggttcccacccaaagatattctccaccaaatgaggatccgaaccgcagattgcacagtatgcgactttgatttttacatcctccggccctacttcctgttccggaatatccagaacagctactttccctctcttactctcgtccgggtctcttaagcttcccactttaactactgatattgatttcaaatcaatccctccatttcgttttttctgttctatttttactttattatgccgattttctggctgcatttctttctgctatctgcctctgaatctcaaccactttttcttcattgaggtgatagaaggctccgaagataaccatggtgaccacaaccactgccagaggaagcagggacgtcagattcctgatagctgcaagagtgctctctgtctgagcttcgtttgccacataacctgaagcactcagcactgcggtaggcagagaaccgccgataatcatagcaaattttattcctaatccaattaatgtcattacaatggctgtatatcttttcccggtttttaagtccgcatattctaccgggtcagtgatgatagaccacagaattcccattaagataccatatccaaatgctgttactccccgggatgccatcattccggcaatggcggaaggaggcattaagtagagaagcagagaccctgctgctgccagtgcaagtcctaacataaccgtaccttttttctttatcttctttgtcaggaatggtacgcagggtacaccaaatacagagggaagcatcatcatcatagagaaccaggaaagcatatcctctcttccggcatagtatttaatataataggcacccatggtggactgtacctgacttaaggtatatacacccagaaacaggacaaacataaggaagacaggtcctaccgtaaataaaagggtaaatacatctttaatatttgccttgttgttagggtcaatcggcggggccggaactctctcaacaatctgatgggaagcccaaagtaaaattgttaccatgatgaccgccataataacagtcgttaccatatatccctgagcaagtgtcatatatctcgtaaagaaaccgcttaaattcggcagcataatggcacagagaacaccgccggactgtgcaaacatcattcgtgtggactgaagcttcgttctctcatcctgatcgtttgtcatgagggaggccgctgatatatatggctgaataataaaggtatacagcatatttaacagattgtatgtaatagccgcccacacaagtttcatgttatacgcaaatccaggggtagtatacgtgagcactgctaccacgccaaagggaatcgccccatacataatgtatatccagtacttacccttctttggattcagccgttcacatatagttcccatcatagggtcattgatggcatcccagagacgggaaaccgcgaacagcatagcaacatgggatgctttcagtccaaaaatgtctgtatagaaatagctgatgtacaaggcaatacactgaaacaccaggttcattgcaaagtctaccgatgaataccccagtatttcttttttttccaacttgtagtatccatactgtgaactggtcttcacccagttagcgggatccttaaggtttttactcatagaaatttcctccgtctgatttggatttctggacgatagcggttacttgggcgccctgtactgcctttgtccggtacttatttcataagccgcatacacttcccgttattttaaccacttatttttcctgctcctcccgtatgttcggtaatataactcgttttgcagcttatctttgttgtatttagtatatattgcacaacatttttttaccattcttcaaaaggacacgtagaaattcaattccgtcctttttgaataagattgttgataaaatatcaaatcaattacgacgaaacagattcctttttttacttattgtgttataatatctaaaggtttttcttttcagaattctttttctatacagcattattgactatcattatctaaaggagggaatctgtcatgtaccatcagcctatacacccgctttgcaatcctaacacaaacacggtctctctgaattcctatgatttatgtatcagctatgtagaccgtcatgacgaaaacacggtggaatttccccacagtcatccaagggaatttgaagtatattatgttgtggagggggaattagataatctggtggaggggacaccgcaaaatgtcaaagcgggagagttcttatttttaaatcccggggtaaagcacggtacgctgtacaagccggaacaaagaaaggtatacatcaccgtagttttcaatatctatcccagaacctccccctactcaaatgactataccgtggaattcgaaccgatacatatggatactttttttaaatttgctcaaaagcagaactttttaatctgtaaggataactataactgttccaaataccttccctggatggaagaagaggctgtaacaaaggagtgggggtggttttatatgctgaaatcacactacactgcatttctgctctctatcatcaggaactttatgcctcctactcacacaacctcccaggcagaagccactacgctgcccattgcattcactaaatttctgcatgctaactatcagaacaaggatctggcactgaaagatctggcagatcatttttatatgactcccagacacgccaaccggctgttcaaggagtattttggagcaagtctttccaagacattaacccagtaccgaatcagttatgccaaaaattatctccttgatacagattactctgttgacgagatcgctgacgccgtaggttttagctctgccagcactctgtcccgtctttttaaggagacagaagggatcaatatctcagaataccggtatctgtgcaagcagcaaaagctgcttgcacagaatctggacgcgcagccatagaacaaccgcgtattataataacagggacggtattggctcatcctcatcggatgaacccatatcgtccctgcatctttctttattcaactattctatcacttcatgtcatcccgtatgcccctggcataaatgagatgctccccctgtggaaatgattggcaactcataaactcttgattgaaattatttttagattagtcgataacctcaatactctcgatcaccggctgatcccctgccgccacagttccgttcgcatcttctgtctggatatcttcacatatcttatctacaatttccatcccttctgttacgtatccaaacacagcgtagtccccgtccagagatggactgtcctgatggacaataaagaactgagagctggcactgtccatctccctggcgcgggccatagaaagcgccccacgggtatgagacaacggattgtccacgccattattcgcaaattcaccttttatggtctcatcagcccctccggtaccatttccgttaggatctcccccctgaatcataaaaccgctgataatgcggtggaatgtcagtccatcatagaatccctccccggcaagcttcataaaattagtcacggttatgggcgcactgtccccgtccagttctgcagatatggttccataatcttttatgttaattttaatgtgatgtgttcctgtctgctgttccccaccggaagtcactttatctgcttcctcttgtgtgccggcagactctgtatctgtcttattttcttctgcattctctgtttttccacatccgcttatcaaagcagacatcatagcagccattacaagtagtgttattaattttttcatgctgtgaaacctctcttatagcttatggtattctcttttttctctctgccctcttggttcaggtcataataaaacatatattgctgtaaaatccccgcatacccctgataccgcaagtagggaaacccctccggatagtgcagatccaatatcctttttatatgtgtatccaccggaaaggcttccacatggtacaggccaaacaggcagatacagtctgccactttcctgccgattccatattgcagcatcaattctttgtgcgcactttcataatctgcttttttcagcttctccagattcaaacttccttctgcaacagcttctgccatccggcagatatacttctcccggtacccaagccccagttttcccaaaacttcagggcctgcctccagcactgcttccggcgagggaaaggtaaaatatacacttccctgccttgtatctctcttttccccagctgcttcgcaaagacgccggacactgtttctgattctcggtatattattattctgagaaataagaaatgtaattatcatctcccataaatcctgctttaatatacggattccccagccatagttcgctgctctgttcaaatacgaatcttccgtatctatagaattttttatttctccgtaatccgtatccaaatccagatattcccgccacagcttctgaaactccttttcagagcaggatagcgtataatcttccccgtgctgggtgatctccaggtactcaccgtgggcgatgattgaatatgtactgctgttctgtctctccatacgaaagcattgacccgattgagcaatctgctgcagatccaggtcttttatctttttttgtatcattgtctcctctttttctaaaggtggctgcaatttatcttgtttcaatccaaattcggcaattttgcaccgtcagactaatattttatagatgcgcggattgacctttgatcaataaggaatacccactcccatccgccggtaactgcctttgctcatgcatttggtgactcacttctccaactatagaggtacagaatcctagcttctctttttgaagaagaaaatattacttgtctatggtatcattttattgttttatcttcaactgtaaattagtgtatgtaggatatatggataagtacaagccctctctcccttagtttctctgattattccatcaaacaaaagaacaataagaagttattgaattacatttccatccgtaacatctgcagccagaagccggaaaaagcagagcagaacataccactacacactggcagaaaaattgcctatttccatttgtcaggcgttgtgggaatcaatcaaatggtactacctatggagagcgacgatgatgatgtaatcgctgttctgaacggatttaatttcaatccacgctcccgtatggggagcgacgcagctctgcggttattgtctgccgtatctaaaatatttcaatccacgctcccgtatggggagcgactagccgccttagcaagctttttaggagattttatatttcaatccacgctcccgtatggggagcgacgataaggagtatgacactaatccttttaccggaatttcaatccacgctcccgtatggggagcgacttcaaaggtaagccaaatacagaggaaacaggggatttcaatccacgctcccgtatggggagcgacagcaaaagtgcacaaaatatcagcattcacaacggaacatatatacattttatacacttttatcttctcagcatatcatgtggcatcctttttgtctacttttactatacattttcttgctttttcaggtgcgaatcccccggcatttttatgttcactttacattcgcactagaatattaatgtatcaacaacattaactccgcgttccacacccatgtgttcaaccttatttttaaaattatttcccagataatagaaccgcaggctgtcaacatcttcatcaataatttctgataggattgcttttaatgtaacacattgggtgttatccaaaatacattcaaacactgaattttgcacacgagttccgtaattcacgcactgttttgctacctttcttaaacgagccttacctgcatttgtttctgtattgacatcatatgtaatcaagacaagcatataaaacctctcttacttccaaaaaaatggtgggtattcatccaagtctcctctcaaatacctggcaagcagcattgcctgagtaaacggtaccatcccccactctatcttttcaccaagatatggatgggtaattatatcctttttcctgttctgccattctgtgagtactatttttctagttgcatcatccatcacaatcgcaccatcttctttttttgtaaatccctttccattgactatctttttattaatcagggttaagacgaacctatctgccagcacgggacgcagttcttcaattaaatccaaagccagggagattctccatagtatcagtcagcggcttaacaatctccatacgcctatagtgctgctgcaaatgttgaagaatatttccgaaactgtcctgataaaagaatcggacagcaattcttgcagcattgggtgcaagtcccagtataaaaaacttctgagacatttgtaattttgtcgttatgccttccacatcaacggcctttccggacgaaaggttttgaaatacgcctgccacaatctcctgattatcaacgcttggctcagacactgcagagaacacgttctggtactcttctaagccattttcagcccaatataccaccgtggtatccccgattgtgcaaaaatattttctgtttctgagcaggtaattcagtgctgtcgtatacgcaaaggctgcatatgtctcaaccggtgcattatagctttgctcctttccataagattcgaatgctgtggcattaaaggatacaagtgctgcaccgctggattgtgctccctgcaccccttttattgtcccatgggttctggcaatttccgaatgtcttccagttaccatgcagagaccgtccggagccttggagctgtctttcaggtattccttccacctctctttaatctcaaagtcctcctgaggatacaccccgtctacataaaatagtaaatttccacctgccagtatctcctctttcatcggtaccaaagcagggcttgtgagggcttcctccggattccagtgttcaaaaaaggctttgacagcagcagcgatttcattttctacaggctcaaggatttccaaatgtttttcctttgcacattggaagcactctatggagcgttcgggttttcctttattgtcaactcccaaaatatagctggaattatcacacaaaaaatttgcagaaaccccggaagatcgggataccatctggggaaccttctttctctgaggcagttctactttcttctttccccgttcttctaccctggtcaatggaattacaccaagcagctctccctcataagaaatatccaaagcaaaagacacatttgcctcacaccatccaggtttagtcaccttaccgtcaccagccaaagcctcatagtagtttaccagagattgaagtatcatcgtaccacctcacagtctcttacatctaaaatccctttgcataaaccagctctgaaaaacataggctggatatttcctgatttgaataatcgaagtcatataacatataccccaaatccttatcctcctccggatatgcagtctgtacttcctcgtttatgtaaagttcaaatttagcaggaaactctctgcatccaaagtaaggggtgtgatagcactctcccctttttaagcgccgtacaataatatctttgaatttgcccgaattgtcgccggcattcgcctgattcgtcatttcaaagtgggcctctataatatagtctacgtcttttaacagaattgctgccctctgggcaatttcctctctgctgcacaagtataatgccttatctcccccattcataaccttcagcacattgctgcctgaaatcttactcttaacctcattcctccttacactcgtaaattgtattggacttcttacatagatcttatctatgatccacttcatgcccgggtgccagtatatggcttccaacattccccgtgcggctgatggcgtaatcacatcatagctgcatcgttccactttcatctcagggcggctaaatagtgcataatcaccccaaaatcttactttcacaccacgactcataactatttcatttcctcgtattgattctctaataaaatacggcatcccctctgctggcatcaatgataagacctacatcctctgaatacagctcacagttgcgcagcacagcaaactcttcatccagaacttcaagttttccggcagcatttaaggcttcaaaatccttttcataaacactgacacaatagtttcccacatccctcagcaatttcctggttctcaaacctaaccgcattttttcagtcagcctggctccttcctcctcctgacatatcagaatggtttttgtcttattttcaataatacgaaattcatttgctgcggtctcaaaagggtaactgctggtttttaccccatcttcaaactgtgaaacgatctcttttgcatccagcccttcgcctttaaagcagtataaccgttcgaaatattcatgtatagcttctaacgaggaaatgtccttatattttctgcagatttgttccgtcacagcgatcggctgtttcaatacggaaggcactctgaattcatcacttttcgtaaacgcaaaaaacttggtcttacagttttcccgggtattattgcagctctccttcacctgaacctcccctggaaatatcttattcagagagggctgtgtagccgtacacagtacagcagtgctgtgataattgcagatcaactcactgattgcacgtacacagggactcagataatttaccggcagcatctgtgcctcgtcaaagataacaacactgttggcaatgttatgcaatttacggcatttggaagagcggttggaaaacagggactcaaagaactgtacatttgtagttacgactaaagatttatcccaattttcggctgccagctgctgatgcagcagctcttcttcactctcgtaggatacatggcagtggtcttccagcacattttcactccccagtatgtcccggaatacctgggcattctgttcaataattgaagtataaggtatcacatagattactctgtccaaatgatgttctacggcatgttgaagagcaacggcaagtgaagatacggtttttcctccccctgtgggaacggtcagcgtgtaaagcccctgtttttcttttcctttatccaggcaggcctgtaagattgctgttcttttgccattcactgttgcttgttcggtctgctccatccatggagtaatgtaggcccggagactttgcagcagctcttccatagaagcattttgtattcttctggcagttccgtctgacatgaattgttctgtatccagaaagtctgcatctaccagacaggaatacaacatcctgataaaaaaagatacactaaaacctccgcggcccacaggcacaagcggagggtttgtaaactccggcatcacaatctctgactgatatgcctgataatcttttaattgctttttcatcctgccatacagagtggaactgcctgcaatatctgcctgtgttcctccatccggcagaccggaatgatgtccggcaacgcaataggccgccattagatagccgcggctgtatagttccctagcgccagcagttgcatgatctacaataggaccgccgggaagtctgagttgaaattcttctgaatatttaccaatatcgtgaagcattccacagccgaagccccaatctctgcagcaaaatttatccgcaaactggccggctagcagggcagtatttttaagatgttcttgaacgctttgctctcttgacttatcatcgctaatatgtgccaaaaactttgccataaaaactccttttgtagatatatgttggtttttacgcgtctattacaaataatataccaggtttatccagataagtcagtatatatatgcaaatcgaatactttttcttgagataatttgtgtgatttgttgatatctgtacttttgcaacaaaaaagaacgtttacccctactaggaaataaacgttctttttgtacattttaaattatttattgttcaaagccgcctgagctgctgccaatctagcaatcggcacacggaacggtgaacaagatacatagttcaagccaatcttatggcagaattcgatggagcttggatctccgccgtgctcaccacaaattcccaacttaatgcctgcctttgtagaacggcctttcttagcagccatctctactaactgtcctacaccgctctgatctaatcttgcaaatggatcggactcataaatcttagctttatagtacgcatctaagaatttgccggcgtcatcacgggagaaaccgaaggtcatctgtgttaagtcgttggttccgaaggagaagaattcagcttcctctgcaatttcgttagccagtaaagcggcccggggaatctcaatcatggttccgatgcggtactggatatcagatcctttttcatccttcactttttcagcagtctcaacaactacatctttcacaaattttaactctttcttttctccaactaacggaatcataatctccggaacaatcttaaatcctttctctctggatacctcgattgctgcttccattacagctcttgtctgcatctttgcgatttcagggtaggttaccgcaagacggcatcctctgtgtcccatcattgggttaaactcatgaaggtcatcgcattttgcttttacttcttccggagttaagcccatatcctttgctaatgctgcgatatcttccggatctgtaggtacaaactcgtgaagaggcggatccaggtaacgaacagtcattggcttgccttccagcacttcatacattgctttgaagtctgctttctggaaaggaatcagttcatttaaggctgcttctcttgcttctacagaatcagagaggatcattttacggatcttcggaattctctcagcgtcaaagaacatatgctctgtacggcagaggccgattccctgagcacctaatttaattgcattttttgtatcaagaggagtgtcagcatttgctcttacttttaatgttctgaacttgtcagcccatctcatgattctgtcgaagtttccgctgattgcagcttcttctgtcttaatatctcctaaatagattttacctgtggatccgtctaaggagatgtagtctccttccacgattttctgtccgccaagctcaaagtatttagcttcttcgtcgatctgaatttcaccgcatccggatacgcaggctgttcccattccacgagccactactgcagcatgtgatgtcataccgccgcgaactgttaagataccctctgctgcatgcataccttcgatatcttccggtgaagtctcaaggcgaaccaggactactctttcgccggctgctgctgcatttttagcgtcatccgctgtaaagtatactttaccggctgctgcacctggagatgcgggaagagcggaaccgattacctggcctgcttttaaagcgtctgcattgaaggttgggtgcagtaactgatccagtgatttagcatcaattctgcaaacagcctcttctctcgtgatctttccttcgtctaccaggtcacaagcgatctggatagcagcaggagctgttctcttaccgttacgtgtctgtaagaagtataatttgccctcctggatggtgaattccatatcctgcatatcacggtagtgatcttccagtttatgagcgattttcatgaattcatcatagcattccggcatatcttcctgtaatttggagattggctgaggagtacggataccagcaactacatcttcgccctgcgcgttgattaaatattccccatagataccctttgcgcctgtggatgggttacgcgtgaaggctacacctgtaccggaggtttctcccatgttgccgaataccattgcctgtacattaacggcagtgccccagtcaccagggatatcattcatacggcggtatacaatggcacgagggttgtcccaggaacggaatactgcttttacagcttccattagttgaaccttgggatcctgagggaattcatctcccattttttctttataaattgctttatatttagcgattacttcttttaagtcatcggctgttaaatctgtatcgaattttgcgcctttttcagcttttacttcgtctaaaattccttcgaagaatgatttgctcatctccataacaacatcggagaacatctgaataaatcttctgtaggaatcatatgcaaatcttggatttcctgttttcttagcaaagccctctacggaaacatcattcaaacctaagtttaagatggtatccatcataccaggcatagatgctcttgctccggaacgtacagatactaacaatggatcttctgtgtcaccgaaacttttgccctgcattttttcaagctcttctaaagctttaaaaatctggccctgtacttcatcggtgatcattttaccactttcataataatcagtacaagcttctgttgtaactgtgaaaccctgagggataggaagccctaaattagtcatctctgctaagttagctccttttccgccaagaaggtttctcatatctgcgtttccttctttaaataagtaaacccattttgccatttgataattcctcctaaatgtaaatgtataatttttgaatattttccgctgccatgaattcgaaaaatactcaatagttaccttgtctacgaataatcgcacataaatcattttaacacaagacttttcatagtcaagtgtcatttataagtttttcccagtttcatacatttactcaaaagcaggtaaaaaagtcataaaataaagggcgaaatccacaacggatctcgcccttttgcctgcattaacgcttatttcttcggaaaatataagtgtcttgggattccatttaccataaacggagcgtagtctccctgaatcaaaggccttacataattaaggaaatcctccgtgatataagtgccgtctctcgttatccactctcttggcaccagcttctcatcattggcaatcttatgtacatcatagattccagttgcacactggtacggatcgtcagatactctgtcaattaccaccatcttgccggtatccccttcatctgcggccttcacagctgcccctccaaccataaatgcttcattaatatctactctggaggcaagatgcgatgcacttctttggaggctgctgaactccacagagcgagtcttacatcctatttctgagctgatcagattacagagatacgtagcagaacctgtgagctgcttatgtccaaacgcatctacatactctgcatttccggaaagctcactgacataccggccatcttttagcttgatgccctcagacactgcaacaacaacattattctttttcttgataagatttctgattttttccataaatttatctatatcaaatggtatctctggaagatagataagatccggtccgtcacagtcctcgcctacagacaaagcagaagctcctgtaagccagcctgcatttctgcccatgatttcaatcacagtgatgagaaccttcttataagaaaggcccattccgtcacggataatttccttcgtcgatgttccgatatactttgccgcgctcccgtatccaggggtatgatctgtaagagcaagatcgttatcgatcgtcttgggaactcccacaaacttctgggactgtcctgtaataatcgcatagtcggataatttctttattgtatccatagaatcattgccgccgatgtatatgaagcattcaatctccaagcgatttaaaatttcaaaaatcttctcataaatagccttgtcttcgtggatttcgggcagcttatacctgcaggatccaaggtaagcagagggtgttctctttaaaagttcaatgtccatatcactcttaatatgctttgataaatctacatattgctcatccagaaatccctgaatgccgtatctcatgccgtaaactttagctgctcctctgtcaatcgctgttttatatacacctgccaggctagaattaatgaccgccgtgggtcctcctgattgtcctacaattacgttacctttcatattccgcacctccatattttgcacaatttctacgcataattatatcaaaaatgtacaaaatatacaagtgtattttgaagaaaaggggacgtgttctttctaaaaagaacacgtcccaaaatcattacacggtgtcccaaactgaaccagacctgtcccttttacctacaaaaccttctcaatttgtttaatcaaaacatctgtttttttatcggaaagatgtagggtttttcttatttctttcctgaaatttgttttaaataatggcattttcaatacctctttcattggtattccagatgctttttcctgcaaatccgctaagattcccaaagagatatcaactctgactatttccatatcagattctacatcatccaggagtatcctgttaggctgtttatgaaaccataaaaattctttttgtcccataaatgcctcctcatatcgtctcttagcattttcatgtattatattagaatttaaactggaaaattctccgaaactggagaaaagataggaccttatgtcctttgtcagattagcttttactggattcatatgaatataacgaaggcagttccagtagtatttttcatcctcaatactttgacttttataacgactctgaaacacataaccagatctattcttttttctattataatattccgcaaaagtagaaagaatataagccatgtatttagataattccggcagttctgcctttattaaaaggtggagatgattgctcataatacagtacgcatgtatttccacaggaactttttccagatactttttgataaggtattgcatgacctttttatcgcttttgtcatgaaatatgtcctctttattaattcctctcgccataatatggtaaagatctgtagaacttctttttcttgctgttctcggtataaatattcaccttctctcatttagttttttataatctacatatgggacaggtctgttttgaaatgggacaccccagatgtattttgggacgtgttctttttagaaagaacacgtccccctcctctggacactagaacgtaaatttatcttcaaaatatgctttcaaatcttctatcttaattctttcctgttccatcgtgtctctgtctcttacagttactgctccgtcctgctcggactcaaagtcaaaggttatgcagaatggagtacctatttcgtcctgacggcggtaacgttttcctatgtttcctctgtcgtcgaattcacagttgtatttctttgacagttcttcatagattttccatgctccatcatttaatttttttgacaaaggcagcacaccaatttttacaggtgcaaggacaggatggaaatgaagaaccgtacgtacatctcccttttctttatccagaacttcttcatcataggcactgcataagaaagcaagtaccatgcggtccgcaccaagagacggttcaattacataaggaatatatttctgtttcttctcatcatcaaaataagtaagatcctgaccggatacgttctgatgctgtgtcaggtcataatctgttctgtctgcaattccccaaagctcaccccaaccaaaggggaaaaggaattccacatctgtagtcgccttgctgtaaaagctcaactcttctttatcatgatccctgtaacgaacttcatcgtcttttaatccaagagtgctaagccagttcaggcaaaaattcttccagtagtcaaaccattccaaatctgtgtctggttcacagaaaaattccaattccatctgctcaaattcacgggtacggaaagtaaaattacccggtgtaatctcattcctgaaagatttaccaatctgtccaatgccaaagggtattttctttcttgaagtcctctgtacatttttaaagttaacaaaaatcccttgtgctgtttcaggacgcaggtatacagtattttttgcatcttcagtaacaccctggaaggttttaaacatcagattaaactgacggatatctgtaaaattatgagctttgcaggtaggacatggtatctgatgctcgtcgataaaatttttcatcttttcctgtgaccaggcatccactgaaccatcaatgtcgattcccttttccgcacagtaatcttcaataatcttgtcagcacggaacctttcatgacactctttgcagtccatcagagggtcagaaaaaccgccgagatgtccggaggccacccatgtctgaggattcatcaaaattgcacagtccacacccacattatatggactttccgtaataaatttctgccaccaggctttcttaacattgttctttaattccacacctaaattgccgtaatcccaggtattggcaaggccaccgtagatatcagaacccggatacacaaaacctctggattttgccagagcgacaatcttttccattgttttttccattattctttctcctaactttccaaacttcgtaatcaatctgtcttattataacctttgtatatgatcttttcaagttctaacccgtagaatttatacctgtttatactcgtagaaatgaaagaaataagaggaatgcaaaactttcagctagtctgtcagggatatcaatcctcccttcatagaaactgaaaaagggacagggctttccgaatttgggacatcccttccctattctgggacgtgttctttccagaaagaacacgtccccctcctttacgtcatctgctccagtatctccaggcttttgaattttttatctatatatttccccgtataagccctgacgatcctaccaagatggttcaatgcttcttctgatacagtaaagctgtacagcttttccagaggagaggccacaatatactgcatggtataccttacggtttcatcaattcccattccgtcttctgtctttttcctgcagtttgggcagagcactccgctttttcggacgctgaaggtatccagagattcctttgccccgcagcttacacattcgaacacctgaggatattcaccattgataaccatggccttcagttcgtatatgtagcgaattagccgattatccagtctctcattgagaagtgctttcaaagtaacgtagagaagattgagcatctgcctttcatctgtatattccctgccgtaatagtctgcgaattccagaaaataaaacccgtaataaacccctggctgagccacagccagttctgtaaagtagttttttaccattgcctgctgtatctggtaggctgtcctcccttcgtacaagttaaaacttccgaatacaaagggatttgccgctgctaaaagggggctgttctgtcttctggccccccttgcaaatgctgtgatctttccccgctcttttgtaagcaggactaaccgtttatcataatcccccacgggcatggccgataacaccattccagtcacggttatggtctctgtcatctctatacttcctttttatcatatccgaagttcttcataagaaaatcactgtcccgccagtcctttttcaccttcacccagagcttaagatttactttttcttccagcatctgctcaatctcgtatctggcattggttcctattttctttaacatagccccttgcttgccgataatgattcccttatgggaatccctctcacagattattgtagcgtcaatgtccacaatatgcccatggcgtctttccttcatggagtctacagccactgcgattccatggggaatctcttcgtccaaagcatgaagcgccttctcccggataatctccgcaacaatctgcctctgaggctgatccgttacggtatcctcatcatagaactgcggaccatagggcagatatttgaaaatgcactgaataatatcctctgtattttgcccccgcagcgcagaggcaggaattatctcagcgaaatccataattttccgataggcatcaataaaggcaagcacctcttctttctttaccgtatctaccttgtttattacaagaatcaccggaacattacatttttccagctgttctgcaatatgcctttcaccggctcctataaaagtagacggctccaccagccataaaattacatctacctccttcagcgtccgctctgccacatgaaccatatactccccaagcttattttttgccttgtgaatcccaggggtgtccaggaaaacaatctgcccctgttcacaggtgtaaactgtctggatcttattcctggtagtctgaggctttttagaagttatggcgatcttctgcccgattaattgattcatcagcgttgattttcccacattcggccggccaatcaatgctgcgaaaccggatttataatttgtattcataccttcctcttcctaaaacagtggttttacttctttaaatagctctttgttttcctcaatctttccttcgcctccaatgacacagattatattctgattcattatggcctctacaatatcccccagtctctgaatatcttcgacggaagcattcagaatctcttccctctctgtaaggatatcctcctctgtgagtttaccaaagtacgcgttcaggctcatagccccttttgtggatggattcataggaacatccagttcactgatggtcccgataatatattttgtcatctctctctcatctgcctggaagctccgaataaatgcaggagtctcactgaatatcttcagcgtatttttcagatggggatctctgtaggataccaggaatccgtccccggatctgcggaaaccgctcatgcatccgtaagccccgccctttacacggatattcgtccagagatattcatagctcaagatcaccttcaggatgcggagcgccccggtgtagtgataccctgcctcttcaaagttaccggcactggccacatattgtacctgtccggaggttttaaagccctcattttttggacggaagtcatatttcaaagcccctttttccacaggctgtgtatacagtccttccttcagccctgctatcaaagcctcgatcccctcgtatcccgcttcatcagcagtatagctcaccaccagatgttccgggcggaaaatcatctgcatcagctgttccaatttggagaatacatcttcttttacctgttcaaaattcttctcaatggtatcgattaagtcatagaatgcaatcccgccaatctgatcctgaaaataagccgttctggaaaaatacgagattgccctgagcatagccgaggagtgtcccgcactggccagggacatctgaagcctggatttcagtttggcgattatctcatacagacgtttctcatccctcaatctggaggtaaaaagaatctcctcaatcatagaaaatacaaagggaagtttactgtatagagccttacttctcaccccaaacatattttttgtatcatatctgtctttggtattgccgaagacctggagtccgcagcttatgcccccggtattggcgttgatctcgttaaataattccccataggaataatgttctgtatccacaaacccaagtacggatttcagaattcccatgtagggtaccagatgggagggtacatcctttgtgtcaaaaagcagggtaagatatccgataccattagtgtagatattgtggtgcagaaccagcgtatctcccacatacttttccgtattataaatcttcgtcccttccctggagatatcggatcgcttcagcataggaatacacttcagtgcctcaggggactcctccccttcctggtactctgtcagacgatgcgtttttttcaccagttcctctatctcagcagatgtaagagaagctttgtaggcttccagtttctcctccagcgccttttccctggcagctgccagtcccctttttggatttacaatcactacagaggcatgggtgttatctaagagatacgtccgaatcaacgcttcaaaatatccctgccctgctttttctttcaaaagttcaaaaatcttcagctgctcaaggtgcacaaaaggtttttcatcatcataaagccagctgtcaaatacatcaatcccatacatcaggcccttgggataagatgcataatcagcttcccggaaacggaattccatagaattaatgccggctgccacagccttctggtcaatgcctgtctgtgaaatcttctccagggtctcccggattaaggctaaaaacctatccttctgttccggacgggcatttttggcgatcactgagaaaaacggctggtaaattccgtcgtcataggatcccataatatccttgcctatcttctcgtccagcaatgcctgctttagaggcgctcccggtgcgcttaacagcacataatccagtacactgaatgcaacacagagctcaacatccagactgtctcccactaccacgttgtaagacagatacgtattctcttcctccggctcattttctgccaccggatattccagaactacctcttttacctgagagaacgctggctgttttggtatctgggaagttacaggcatggcatcatatttggacagatactcccgatccatccacctgagtttctcctccatgtccatctttccatagagatagatatagctgttggagggatggtaatacctgctgtgaaaacctaagaactcagaatacttcaggtttgggatatctgccggatctcccccggattccacaccatagggggtatccggaaacagggaatttaaaatcgcccggtccaacacctcctccggggaggaaaacgcgcctttcatttcattgtataccactccgttatagcgtaggggatcttcgggattctccaactggtagctccacccctcctggcggaaaatctcttccttttcatagatattagggaaaaatacggcatccagatacacatgcatcaaattctgaaaatcctgatcattgcagcttgccacaggatacatggtcttgtccggataagtcatggcattcaaaaaggtgtttaaagaccctttcaccagttcaacaaaaggatcctttaatggaaaatgcttggagccgcacagaacactgtgctccaatatatgtgccacccctgtgctgtctgcgggcggcgtgcgaaatgcaatattaaaaaccttattctcatcgtcattttccagaagcataactctggccccactttttctatgcttcagaaggtatcctctggaatggatatccgcaatcatctcctcctgaagtaattcgtattccggtatcttttctatctgcataaactgcctccaattcttttatatttttatcttctcccggattccggggcttattctaactgttcaaagacgtatcaggcatattataccatttccggataactctcacaaggcatggaaaaagaaacaagacgtgaaaaaaggaacaggagctgtttctacagaattcagtccctgttccttctatatattatgaatgtaaaaatgcaggtagtttacagatccagctgatataccctggctgtatttttgtacagcactttttccaaatcctcttccctgctgatcacagagcgatatttggcaagctcaacaggaatctgataaatattatcagaagaaaacataatcttatcacatccaacctgttttaccatgttattcactccaatcacgcctacccagctcggttccagataaacattctcgaattttcttgccagataaatagcctgctgattgtgcatctctgaacctgcatgggccaggatacagggaacatccggaaagctctcaagtgccttttccacactgatgggatccgaaaacgggatgcccgctcctgtgtgaaccatcagcggcactttcagctccctgcacacttcccatacgtgaagggcatccttggaagaaggatgggttgcatgaccgataggtgtaatcttaatgcccacaaaccccagctctttgatacatctgcaggcctctttatcatagtcatccggacggaagtgggggttaatggatgccattccccagaactttttctttgtactctttgtcagctcatagatcctgtcatgaatggccatgtgatcttccatataaatcctcggaagatacggctgtaccacagctccatccacatcatacttgtcataaaaggaaatcaaatcttcttctgactgttcctcatcaaataccacatcaacacccagatgggcatgtaaatcaataatcatagcttaactcctttctacgctgctttctccacagttctttttaccttcttctctacagcatccccggaactgagaagaagtacaatgataatcaatgctccttttgcaatattctgtgcgcctacggagaatcccataatctgcatggccgttactatcagtcccaggaacaggcatcccaccagagttcccggtacatttgcttttcctcctgatatcagtgtaccaccaacaacaatacttgcaactgtttccagagtataagaatctcccattcccagaagggctccgcctacccttgctgtagtgagcatacctccgaaggctgccagtatactggaaaatacataagtaagcatttccaccctgtttactttaattcctgcaagctttgccgcttctctgttctgccccactgccagaagtgatttcccgtaagacgtccggttcagcaggaaccaaaatcccaccgccagaaggactatgaggaaaatcatcagctgtaccccaaatatccttgtagtaaccagcttttgaatcaccggagcaatggcaaagatagaaaagtttttgttaattaacagggcggcagttgtgaggatatagttcatcgccattgtggcaataatcgccggtatctggagatagattaccatcacactgttcaggaatccgatcaccgctccgagtaccacaataacaagaattgccagaggaacatttttattctccccgttaataatactcatagagacaaatgccattagagtcagcactcctggtatagagagatcgatagccccccgcccggaggttactaccagcatctgtccgaaggcaaggattgccaaaaatgctgctgtataggcattggataaaaagctttccagattcagcctgcccgaagagatacccattacaaaccacagaaggaaagcgcctactgctgcccacacccagttgttttcttttatatattttttaactttcttcattactgcagtttctcctttctcagcaatctaaaggaaagaattaagattaataccagtccctggattgtagctgtataatctgtactcacttttaaaagtcccagcagtacgctcaccatagtgagggaaatacccccgaacacagctcccacatgtgttaccacaccgccggagaagtaaccgcctccgatgatgaccgccgcaactgtaagcatagtgtaagttgcagatgcattgacatccgaagctcccgtaattgcagactgtgcaatacctcccatcatggcaaagataccagcaatcagataggtagcccagtatgccctggcttttgaccagccgctgtttctcatcgcggtatcgttgtttccgaagccccgcattaccgtaccgtatctggaacggtagattagaatcgccagtatgataaaaagaatcagccagatcaatattccctggagtaccggattattggcattgaaaagatgaaccatccattccggaacatgaccgcccggtacatcctgaagcacatacgccatgcctgtccatacaaaagacatgcccagggttacaataatgggcggaacgcctctccagtaaatgatcagtcccatgcaggaataaaccagaagcagtcccaaaagacagagaatccctaatgcattattctgatccagaatagttgcgcacactacgtttacaaggcccataaaagcgcccacgcccaggtcaatatgtccaagtccgatagcaaacgtctgtgccagggctgcaaatataaatggggtaaatcccactgccaacaattccacgccaaattttgtaaagatggacggtgagagcgccccgcatactacatatagaattaacatggcaatcagtgcaaggagataaagtttcggagactttgctttctttttctccagattttctgcttttttctcattgttctgaaatgccagcttcagcatagaagaatgctcaaactcatcgtggttaaattccccggccacactgcctgcattcaggacaaacagtctggtgcaatactccagttcggcatcatctgatgttctccagataaccagtttcccttcttttgccgcttcctggaatacgccgtagagctcttttttcgtccctacatctacacctctggtcggatcgtccagaaggataatgtcagcatccaccgccatagccctggctatcagtaccttttgctggttaccgccgctgaggcttgtaatcaaatcttcattggaggcacattttgtcttcagacgctggttccactgttctacaatctcattggttctgccggtagaaataggtgcaaacaaagctccacgtgctatttttgagataatggtgttgtctgtgatagaccataagggaaaaataccctctttttttctgtctccggccacataggcaacctttccctgtatatgcaaacctgcttttttcttcttcgcctgaaagaaaacctcctggaggaactccagctgtccgttgccctccagccctgtcagggcaattatctctcctccgtacatttccttggagattttcttcagcataccattcgaataattatcaaaagcaacttttatattcttgttaatttcaatgggagccattgctgtcttttcttcttccgccgtcttttctcccacaaccccgtcgcccatgcgggctaccatatcctcttcgctggtttccccgatagggcactgatatttctccgctccgttctgcatgatgaagattcggtcagccaggaacattatttctttcagcctgtgagaaatatagatatacgagataccctcccctgcacttttctttatgtagtcctgaagctgagatgtctgctccgcgggaagagaggaagtcggttcatccagcaccagcatcttcacctcagagtcactggtggcccgggcaatctcaaccatctgctgctgtgcaatacttagagtggcaagacctgcattcacatcaatgccgtgatccggaaatacccggtccagggcttctctcgccatttcctttgcctgtttccgccatttcatgtcctttttgtcgaacctctgaaactgctcaatataaaagttctcgtatactgtaagatttttacacagagacagttcctggtgaaccacacggattccttttgttctcgccactgccggagtatatttattcatatccacagcttctccctcaatggagagcgtaccttcattagatgtaataacaccggagaggattttagtcaacgtactttttcctgctccgttgcctcctaccagggcaagcacctcgccctttttcagctcgatgctcaggtgatttactgctgttgtgggaccatatatcttcagcagattctccgctttcaggaaaagttcctgctgtccctttgtttctgtctgcatttccaatcctttcaccatgcctttcgtttattttaaaagaggctgccgcaaatgtgaaactcacttttacgacaacctcttggcttatgatttaattattttgccgcgtcaatgatattttcaatcacatactcatttgtgaaatccggggaaacaaaggtgcctgccgacattccctcatattcgctgagattatctactgtgatatgaggaacagcaatcatcatttcctccggcacgtcatagccatttaaaatatcaagggctgtccagaatgctgccgcgccgcagcctggtgtggaaccctggcttaatgtctcataaccatctttgctcatccaccagttaataaattcagctgtgttatctccgataataatcggtgtctctctgccggactgttcgaatgcattgacagcaccgatagcatctccgccgcagtgggtaatcacggcatccacatccgggagtgaaggcagtacctttgtcagttcttcctgtgtcttagtggcactggcctcgccgattacttcctggacaatcttgagatccggataatttttaattgcctctgtaatgcctgcataaattccctgatcaggagctgcaccggatacgcctcttacaacaaccacatttcctttgccgcccagcttctctgccacaaattccacgctgtcttttccaatctgctgccagggataatccatggtatacacaccctctaaatcaacaatggaatcgaatgctaccactttaatgcctgcatccagagccttctgaatcgtactgtttaaggctgtgggagatgccgcacagatacaaattgcatctacgttgctcagaataaagctgttgatctgagcaatctgtgagttgaccgtattatcaccattctgtacttcgtaatcctttatgtagcctgcagcctttgcctcatctgctgcttttgtaaaggcctctaccatctgtttccgccaggtattgccgaagtaggagttagaaaggccgattacataatcacctttttttaatactcctgatgcgcctgcgtcgtcagcggatgcatcctcttccttgtctgcagcctgggtactttctgtgtcctttgcttcctctgttttgcttgtgtctgcacttgcagaatcagaaccgccgccggaaccacatccaaacaacattgttgatgccattgtcatgcagattaacatgctcaataccttctttttcataccatccatcgctccttttcttttcattatggtcaaattgtcgtctgaccgttatataattatacgtttgatgtttaatgtatatcatatattcataacaatgtcaatgctttgcataatttttttttactatttccctatactttatacaatttccacaaattttgacgacaaatttctacaaataattttatgatttcctcattcatttcattagacgtattatcttttctgaccgtccccccctcatctcacatatttacattcagacatgctgtggcccaaacgcaaaaaagaggtatcgtgaagtaaattcatacctcgcgatacctctttatttttctcttactttcctgcggccatatagaatcggatcaaagaatccaccgtcccggtaagattttctttgctcttatatcgggatacagagaaatcctcagccgttctgttaatgctgaaaatcgcattgactccaagctcatatgcaccttctgcaccgtctccaatggaacctacgacagcggttaccggcacgcccagccgttttgcacgctctgcaattccgatgacgactttgcctccaaggctctggctgtctattctgccttctccggtaaataccatatcagccccggctgccaattcttcaaaatgaatcatatccagtactgtctgaatccctgattttagtttgccgcccataaaggccacgattccggcgcccaatgcgccagcagccccggctccctccatacgcgacacatctgttcccaaatccttctgtataagctcagagagataaataagctggctgtccagttcctttaccatctccgggtccgcccctttctggggcgcaaagatgtaggctgccccctgggggccgtacataggattgttaatatcgcacatagctgtaatggaaacaccttctaaaagctttcttgtctcgctgttatcaatggatacaatttcttttaaagtaccccctgcaggaataaaggattctccctctgcattccgaaatacggttcccaaagctgcggccgcaccggctcccccgtcattggttgaactgccgcccagcccgattacaatatccgtgcagccattttccacggcatgtctgatcatctgtccgactccatatgtactggtaactttgggatttaatctgccctccgcctgcggaagtcctgccggctgtgccatctccagaattgcctggcttcccaccttcgcatagtatacatccaccggctccatataagcattctgtacccgaagctccaccttctctgcatcaatggcatataaaaaacagtccacggttccctccccgccgtcagctacaggcactgctttcacctgacagtccggatagaactccagtactttctctttgataatatcgcaaatctctatggaacttaaggtgcccttaaatgaatcgggcataatcacacattttttcatcacatgctcctcctgttaatctcattactcagacaaaataattttttcctggtcatagggcacatacagattgcctgaataatactctttaccttctctcatataaagcacttttcggttttcataatttttatcttccgtatgccaaagcacaagattctcaatccccagtctgtcagcaagttcacaggcatccttgactgtgctgtgatgcttctcatagggtttaaaaatatccgcctgggaatcgagacaaaatgcctcatgaagcagccatgcgctgccacgcacctgcacttcattggcatcattatatggttcatccccggcacaggttaactttttcccgtttttcagtaccgtggtaaacccgaattgctttgcctttgttgagtgaatatcaaaaaattccacatcatagccaataatgtttctatgctctccatcctccacaggaaccaaaaaaattctctttcccagcattttatagaattttccctgaatcgtcagccgtgctatagtgtctatggtctctatgagatccggatggcagtaaatgttgcattccccctcataagtgccctttttcattccggtggctatgaggcggatcatccacacaatccccagaaggtggtcacagtgttcgtgggtgataaaaatatcatggataccggcaatgggtacctctgcattttccagagcagtcagaattccgtttccccctccagtgtcaatcagccagtacctctcatcccgttccagtacaaaacaggtattaaagcatttggtcactacggcgttgccggttcccagcacaacaagtctttccatttattattcctctccagctgctgacaggccctgaagataatcattaattgcagtgacatccatctccgtagtaacctgttcagccgcaccttcttctcttgtcaaagaacggtacccagaaaagccaatccatcccacaatgaccaggcataccaaagcaacaccggccctctgcagcatactgatgcgcttttgtttcttcataatcttttcccggtttgctttatcctgtttatatttatctactttttcctgactcatgcgtatctccttatcctttttaaaataagatttattccgtatggaacaccatacgaagttattatactatatttcacaaaaaaatgctcatttttttatgagcatttttaaaaaatttattcttttttttacagaactacaataatgcctccgtcattggcatacatactgcttacccctgcagtgtccatgattatcacatctttcaccttaatcttctgcagaatggcatcccgcaccatatacgcccgttccggacagttgcagtgagtaatacccagaatcctgcccgcactgtccgatgctttctctactacatagtcgaccatttttacaagagccctgttcatcccccttgcctgatccagctgacagatggtcccttcgccggtggcgcccataacaggcttaatcttgagggccgttgccacaaaagccttcagattactgagccttccgttttttctcagggtttccaggctctccaggacaaaatacgtattctgttccgcgatatatgcctcaaccgtgtcaataatatcatcaaaatccattccctgggcttcgcattcttcaatcttcagggctatcagggtttcccccacggaagcagatctggagttaaacacgtaaatctgcttttccggatttttttcatggaccagattcattcccagcactgcactgttataggaaccgcttaattctgacgacagtgtgactgcatacacatgatccgcgtcgctttcaaatgctttcatatatctttcaggagagggacaggaagactttggacagttaggactttctgccactcgtttcaggaagtatgcctgatcaaatgtttcgtcatctataatatcttctccgtctaccgtaagagtcagagatgctctatcaaagcgtggatccgcctttaatctttctggtaattctccgcagctatcaattacaactttataactcatatcgtcctcttttctatactatgtagtatcaaataccatgttttatcttatcacaaaagatattttttgaaaaggcctttttaccggaaaactctaggattttttaagtttttgttttataataatccggtatgtaagttaactcgaaaggaaagataccaatgattgctctgaatatcctggatatcaggaattttatgtctaaattactgggcgggaactcttttgataccttctggtttgtggaagcttcgattaccacctatgtgacctttaccatagacgggaacctgcacaaagaattttttgactcctccctggcagactctctgcgtcttgaggagagagattatactttatggaaagaagtaaaacccttctgcttttctattatgcgtggaaagcatacccctctgcattttaaaatcattttccgtctctccccggaacatactgctgtactgctgacagacaggaagctagcttaccggcctgaggagatcaacggcctgttcctgaacttccagtatgacggccgtcagcttacctgcaccaccggaacctccctgaaggttttcacaatggataaatcactggattatgcctgggatgatatgctcaaagacttctttaaacgggaggaaatcacagtacaacccctataaaaaggccccggaatctttctgtaagattccggggtccttaccttttatcctcttttatttggccagaagcatcataatctcattgcttcttgcaatgaactttgtcattgcctccggtgccagctgtttatggctgagcatcgccagatcgtagagctgttcacagaacagtttgacattgtcaccctctttatggtccaatacgtactgtaccagcttgttattagcattcagtattaaggtctcactgcttccaaacataccagggtccatgccatacatattgtacattttcatcatatcctgcattcttctgctttcctcagataaggtcatcatagaagaaatattctcatttttcagcttttctacctttacttccagcttttcgttgtccagagcctttcggaatacttctgtgagtgtctttgtctcttcctccagctcagcctggctgtcctcttttacggatgcatccagctcagaatctattctctggaacttaacttcttctttcaactgctccacatgggagatgaacggcgcatcaatgttgtgcttcagaatcactgcgtccagtccctcttccctgaacatattgatatactggctctgctggatctcgtctgtcacataatataccgtggttttctccggctctttcttttcctccccatcgtcagaggtctccgctgcctccgtactttcctttggcgcttcctcttcctctgtcttgttttctttgatgcagtcctccagcgtcagatatttcccgtcgatgtttttatagagaatataatccatcatcttctctgagaacttctgatccttcagacatccgaatttgataaatgggctgatgtcgtcccagtatttctcgtaagactctctgtccgtcttgcacatacctgttaacttatcagcaacctttttgctgatatagtcagagattttctttacaaatccatcgttctgaagcgcgcttctggagacattcagcggcagatccggacagtcaatgacacccttcagaagcataaggaattcaggaattacttctttaatattgtccgcgataaatacctggttattataaagctttatggtaccctcgatggaatcatactccgtgttaattttggggaagtaaagaataccttttaagttaaagggataatccatgttcagatgaatccagaacaggggctctttgtaatccataaatacttttcggtaaaagctcttgtagtcctcctcagagcagtcgttgggatgcttcatccacagaggattcgtgtcacttaaagataccggacgtttgtgaattttcactttatctctggcaggggaaacctctacgacttctttttccccgttttcgttctctttctcctctgtttttgcttcctcatgaatatgctctacaacaacatcgtcatctcttaagtcctgttcatcaatggtctcaaattcctgctctgcattggctttggacaggaagatttctaccggcataaaggagcagtacttttctataacttcccgtgcccggtactcgttggcaaactccaggctctcctcattcaggaacaaagtaatctctgttcccacagttgtcttatttccttctccgatttcatactcggttcctccgtcacactcccagtggacgggaaccgccccttctttataagaaagcgtatcaatatgaacctcatcagcaaccatgaatgctgagtaaaagcccagaccaaagtgtccgataatctgatcgtcgttggtcttgtccttatatttctctaggaattcagtggcaccggaaaatgcaatctgcgtaatatactcttctacctcatcggcctccataccgataccggtgtctatgaacttcaaagtcttctcatccggattaacgataacctctatcttgctcttatagtcctccgggaaactgtattctcccataatctctaatttctttaactttgttatggcgtcacatccgttggaaatcatctcacggaagaagatatcatgatcggaatacaaccatttcttaatgattggaaaaatgttttcactgttaattgataaattaccacgtttattatccatgatagtggtcactctccttttctgctgaatttctatgttctttcgcttttcctctgatttgtttatctggaatttattttaataccctcccatggaaaagtcaagagaaaattagcactcattttgattgagtgctaacaaaccattgattcaggaattttaattgtaacctctgcgcctttaagatagtctgcgttcgtaagaattagttcgcctccatgtctttttgccaccatactggcaatatataaccccatgccatagtgcagattagaagaacggctttcgtcatccatataaaattcttttgctgcgtttgtgagagctttaggagagaagccaggtccggaatcgcttacacgaaacactgccgtgcggtcctttacagcagcatagaatgctatggtgcctccttggggggtaaagtctgcggcattagaaaacacatttaacagagctctgtgtaacagcccctgatggatgtggagggttgcgggcagttcacctgtgtcccagcgcagttctatttccttagccgtcagcagcccttctaccgtaacatacagttcctccagaaatgcccgggtgtccacacagcggatctctatgggagcaccgctctctgtctgagagatatctatgagtgctttcacataatcctgcatggtctgtatgctgctctggatatatccgcagtactcctcctgttcctctgtcagttctgactcatgaagcaaatcagtattgcccctgataatcgtgagaggcgttttcaggtcatgagccagcgaagccatctgttccttccttgactgctccagcttccactgcctctccagagactctttcaaagctatgcgcatctgctccatggcattaagtaccgtattgatctctttaatgctgcttgtcatcatagagaattccaattcccggttttgtatctttccggccgccgatatcaaaggatgcagctttttcttcagagaacggccaaagcagacagagataaaacacgtgtaggagagcagaatcacaagcactgctgtcaggatcagattttgtggattgggaagataccttctaagtttcgctgacttaaactggggcattatttgaaatctcagtacacaatacccgtcagctaccggagcaactttatagtaatttcccagcctgtccgcactctttccccggacagcgctccatgcatatccgctctctctttttccgatgcttccctcacgcatggttccatccggatcaaacaccgcatactggcacaattccggaatgtcctccttagttacctgtcctgcagcggctatctggccgcaggcccggtcagcctccttctgtgcataatcagcagcatagaccatctggttaaaaacaagagtattaaatatacagacggcacagaaggcggtcagcagtgcccccgcacagagatacatgaaatattttaaaaagaacaggcttagggagactgctcttttttgctttatacttcccatttatatccgatcccccatactgttttgataggcgaatactctgcctgttctaattttattcgaatatttttaatatgcgtaataatagtagagtcattgctttccccgtcatatccaaatacattttcatatatctgttctctggaaaacacctgacctttgctgcgggccagaaattcgcatatttcatattcggcaggtgtcagctgcataaccgtgccgttcaccgtcagctctttggatgacagattaaactgtgcgttgggaactgaaagccgtacataatgttcacggtgttccctgcgcagatgcgctcctatcctggcccgaagctcattcgcaccaaaaggtttgcagatgtaatcgtcggctccggtctgcagcccgtacacaagactctgctcctgcatcttagctgtaagaaacaaaatcggacagtctgtcttgccccgaatttctttacacacggtaaacccatccttcccgggcatcatgatatccaataatatcaaatcaaattgctctaactgtacggcttcaagcatctgagaatcggagacgacggtcacctggtgcccgtccctggacaatattttctgtatcattgttaaaattgcggtttcatcatctactgctaaaatatttgccatctctatctattctccttttataaaaattataccctcaagtaactcacaagtataggttaatcattaattttacgtccgtcccacctggaaaaccagagtactcccgcaagcagggacaggatggtaaatcctacgcatactgcagcggcagtctttccccggactgcagagagaggatccagtatgcccagatatttctgcagatacagacccggaaacctggaaatccacgcacacggcacatacatccagatataagtccccaatccggtaagcaaaagggcggacaccaggctttctacgatccccagtcctacagaaattcctttgccaaaccgcaggcttagaaacaaatgccaagtgtataatgaaatactgctcacaaacagcaccatccccgccttccagtaaacccaaaaccctgcctcagttcttcccagcagacagatatttccggctccgaacattccgctggccatgaatattgctgccgcttcaaacacaagaagctgcagcagtttgctaatgaaagacactgcccggcaggggacggacagcatattctgcaggaccccggaagcagtttcttgttctgcggctatcgcggaaaacactcccagaagaatgggaagagcaactcccaaaacctgaaaataggcctctaacttagagacaggattccagggcgcaaatgcgtaatatgtcaaaaagacagctgctgttcctgccggaactaatccatgtgccccccgcactcccagccgccttgttttcattacatcagcttttatataccgaaccagctgtctcatgcttctccctcccttccagcaaaccatcggactgtaaaaaaggtcaggaccacaagccacaggagtgatagaagaacgccgggaacaatcacccccatacctaagagcgggcttccttttggaacaggcaggccgttgggctgaattcccagcaccggacacatcaggcgcacaggaatagcggaaggacaaatccaccagatctttgtatccgcaagagccgccactcccccagcagacagtgccatgccggaaaaaatacaggcgaacagcccaaaccttgcactcaaaaacaaataaagcggtatggcccagagataggatatgctcagcagcagggccccaaaaacgcctttcccaggagatattgtggttccaaacaccattcctcccacaagtgaacccaaaaaaataaggatatttgacagaagaaggcatacactgcagtatattatttttcccatccagccggctcctgccggaatgccaagtgacagcatcgtactgaagttgagttctttgtccttctgtatgcacaggtaacagagtatggccatcatgccaggaagcagcatagtataccaccaattccatgtaccggcggggagggcattctcaataccgcctgtcagagacagtacgaggagaagggtaatcgccggagtcaccaccggcagtttactgccaatggtatgctttaattttaggtgttctgtttttgttaaactccacatattatacgcctcccctcctattttccttcactacatccataaacaggccctcgagatcctccccaggctgaattcttccgcagtaacccagcacgcccccggccataatcccaatatggtctgctgtctgcactacctccgagaggatatggctggataatatgactgtgattcctttctccggaaaggaagtaatcagctctctgagctcctggattcctatgggatccagaccgtttgtcggctcgtctaaaatcagtaacttggggtcatttaaaagagcaagggcaatccccagccgctgtttcattcccagtgaaaaatgtcctgctcttttcttacctgtattttcaagttctacggtatgcagcactggggcgatgcaagtgtcaggcagtcccaaaattgttgtcctgaccttcaggttttcccacgctgtaagattttgatacacagggggcgtctcaatcagagagcctatctgccccagatcctttctgctccagggatgaccgcggaacaatatatccccctcacttgggtgaagcatccctgcaatcatcttcagcaccgttgactttccagccccgttcggccccaggagaccatagatagagttttcctgtattttcagggataggtggtccaccgcggtctgctgcccaaagcgcttcgtcagatttctggtttctaaaatttccctcataataaaatcctccattcattgtctaacttcaaatataaacataacagttaaatatgaagaaatgctgaagacagaatccctttttcttcccggccgcttatggtatactatgcaataaacttatcaatcaaatttaagcgaggtacatacatgaataaggctattttctgggactttgacggaacattagtccactctcagcacctttggagcaatgcgatctatgaaactcttctgcactatattcctgacacgccggttacttttgaggagatacgggctttgacctttgatctctatccctgggataccccggatgaggattttacacagatcacaggaagccgctggtggaagcacatggaaggaaggttctctgaaaagtatgtgaaggcaggggttcctttggatacggcacagcaggcaagtacccacatcagggaaaagatccttcaaaaagaaaaataccatctgtatgaggacacgctttctgtccttggtgcctgccggatgctggggtatcacaattacatcttatccaataattatccggaactgccggaaatggccgaagctctgggacttacctctttttttgatgaaattatcgtctcagggctggtgggatatgacaaacccagaagggaaatctttcagattgccctagagactgctgactttcccgaagtctgctacatggtaggagataaccccgttgctgatatacagggtgcacgccagatgaagattcccggtatactggtccaccggggagaacacccggatgctgaccattgcctggacaccctcacccagctcttatccattcccggtttccggtaacagaaaaatacggccagacccgatgttttggcggtcttgccgtattttataggtacatcttctatttatggatcttactatactcttttaccgcatctacaatagcaatgagattttgatttggtgtcagcacaggcactgcgcattccggagaaatcagtacgatgcctgtatccagcagatcaaatacctgcttttttatctcctccggagttcctttaaacagaagcttcggattgttcacccctcctgtaagcaatatcttatccccggcgagcttcagcatctcccccgcatcatttctggaatcaaaatgaaaggcttcaaaccctgattcgctgatgagggcaatgcggtctaaggtctttccgcaggcgtgcataatcacagggcctgattttttcagccacccatgattaatcctcttatggattggcagcaggaacttttcataggctttggggctgcagagatccccgcttacatgatctccccacaggataatatccgcgccggcctcaaactgggcttctgcaaacatgacagagacaggtgcaaacgcctccagataggcagacgccttctctgggtccagagcagtttccaataaaaactgctctggaccgcacatattataggccgttgtccatgggccaaatacttttccgatgattgccacttcatccccataccgttttttcagaagacgaatggcatccagcactaccttaaccggccgcctgtccaaaaaatcagccggtatcttaacctgggacggatcctggatgggatgacgccgtatcacaggcatggcatcctcttttccccactctacctctgcacctaacgctgcggcggaatgcaccacactgaacttcggcataacggagtcaaatcccagaagttctcttccggcagcagccgctaaagccatcttttccccgtccagatgcacatccggaaattttaagccgtatgctctcatactgtccatggtgattactgatgtagggttaatgaccggcgctctgtccaccggcttgcgtgcaaaagctgccataactctctcttttgatgacatttccatgtaactgattcctccttgctgtttctttcatcctgtaagcagatatttctctgccgtttccctgtatagcggactgcggcagaaagcagtctgtgctttatgttggcatcaggataccgggcagccatgttaccagctccggtaccagtgcaataataaaggttaatatgcttagcaccagaacatatggccagaccagtctcataacctccccgatcttagccttcgcaaggctggaggagatgaacagaagaatccccacaggaggtgtcactgccccgataagcagtgtcacgactgtgataacgccgaaatgtaccgggctgaacccataagcggccgccataggggcaaggacaggcaccatgataatcaaagctgcgttggattccataaaaaggccgatgataagcaaaaatactacaataataatgataaagacatttggatctgcagtgatcccatggagtacggctccaatctgtgcagggaaattattaatagtcaaaagccagccgaacacagaggcgatccctatgatcaacattgggattgtagtggcaactgcagccttatacagaatgtctttgatgtcccgaaacttaatattcccgctggcaaatcccacgataaatgcgtacgcagacgcaatggcccctgcctctgtaggcgtaaaaatgccggaaagaaggccaactatgattataataggcatcagaagcgcccagaacgcatccttaaaggcaatccagatttctctcatgctggaacgcctgtgggtggggtagccccttttcgccgccacataataggaaagaaccatcagtgaaattccaaacataagtccaggtataatgcctccgataaacatctgacctacggatacactggtcatagagccatagattaccatcatgatactcggggggatgataggcccaatggtagacgcagaggccagtactgccactgcatagtctttgtcatatccctcatccagcatagatggaatgagaatggatccaatggctgaacagtctgcggacgctgaaccggacacccctgccataagcatactggataaaatggtaacctgcgcatggcttcccttaaaatgtcccaccagcgcagatgagaaccgtaccagcttcttcgtgatcccccctcgggtcatcacctcccccgccaggataaagagaggcactgccatcatggagaaggagtccagcattacaaagattcgctgaggcgccacgattcccggcagatttccctgtaccagcaaagcgatgatagaagacgctccgatggccacggcaatgggcattcctgtaaacatcaatacaaaaaacaggataattaatacaagtattaccttcatattcacgcctcctcttccggtgccgggatctcaatgtgaaagcagatttcatagagtatgcaggccccaaacacaaaggaacagagatacccgagaaacattccaagataggggatcccaatgggtatgcgcatggctggagtgggggtaaaaaatgtctgtcccatcaatatggctgtataaaatcccaggtatcccataacccccataataaccagcgcatagaaggctttcgcccatctctgcataggcgcgggaagtttggaagagagaaaatcgattccgatatgctgatcatgcttcagagcaatggagctggccatcatgatagcaaagattccaagatatctggcaatctcctctgtccagagaagcggtttgttgaatacataccgaaagagtacctgaagcagagtagctgccagtatccccaggaaggtaactgcggaaatccattctattattttctcaagtatatagataaatcggaaataaattctgtgcggaattgctttttcatccatatgtatacctcatctgttttactctttcagcttttgaatactgtccataaactcctgggcatttagttccttcacatatttttcctgcacagaggcacaggcatccataagcggctggcgatcgatttcattcagctcgcatccggaatctaccattgcctgcagggccgcctcgtctgcctccaggaatttctcccattcaaaatcagtggcctctttcatggtatccagcataatctgctgcacgtcctccggaagggattggaatttctgttcattgatgaggggacagatagtgctgaagatatgattggttcttacaatgtatttgcctacctcatgaaacttactggtatacatgggctccgcagctacttcaaccccctctaccacgcctgtctgcatagcagtatacacttcgctgtaagggataggcgtgggattggctccaagcgcggtgaacatatcgatatagaccggcgtctcgggcgcacgcatcttgaccccctggaagtcttccagcttttcaatttttttgttggttgtcatcatcacccggaacccggaacaccatccggccatcatgcggattccgttctgttccagcagtttgtctgccagtatctgacccggttctccgtccaggctggccctggcgtgatcgtaatcctcaaataaaaacggcagatccagcaacccgaattccggagttatattcataatgagcgcagatgtattcaaagtcatatctatggttccaagctttaggccttccagcacatctctttcccctcccagctgtgcggcaggatagacttcgatcttgactcttccgtctgttctctcataaatcaggtctgcataatgctttatggcaacatcataggcgctgtctatggccgtgtggtgcgccagcttcagcactacggtatctcctgaggccggtgtctccttttcggcggtttcttctgtaccgctgtcttctttggtttcttttgtctctgactcctggttctccggtgccttattgcagcctgccaacaagcagctgcatgttaaaatcgtacccaatgttaacgcaattatttttttcatcttcatttcttacctctcctttcgttctaagagaactcacctctcctcttcgcccccgcagaagaagtgcacaaaaattgttttctctttttatgagtttcggtattgttattgtataataatatgttccattcggctatcgcgcgataacataaaaatgtttttgttttttgtgctgtcaacataagaaatgaatcaaatacctattttttattgtttttcataaagtaatgaagatattccaaaaactccctgtccgaaacctgctgcatgggattaacccctaataattctcttattttgttaaagcggaataccagggtgtttttgtgtacataaagttctttgctgctaatattaaaattatagttattcttttgcaggatttctgtaatctccagaaagttttccctggtcttctcatccatcattttgtcatataccccataaatatccctgtattcaaccatggcgattaaatttttcatgtattcatttacgtgttcgtagaaatatgccaccttttcctttgcattgtttttcagccagatacagtgctggtagcctgtcctgtacttttcatacctatcctggaaggtcccgacgcaaaactgatatcctgcgcctgccatatccagataatttttacagtacgatatatactccgccaccgtctctttatagttggataaactctccgatgcaggcttaaagctcttaaagattaccagttccttatcccgcactactgatataatatcctgcctgctgtacaatgcactatccttcagttttctctgtaccgttgggacatctgccatatcgtccagcagaagatagataggaagacggatatactgttcctcccatcccagagtcactgcatcttcccgcagtttttctatatctgccacttcattcgtaagaattccatagataaagcgttctttcatactttttctctgtgcgctctgcctgtgctgcagttcaaactcgtacatagtctcaatggcaaactgcatcactttacctatctcccggactttcccaggttcacctgtgacaccgatagcacctatccgttttcccttttgaatcaccggcagcataacccctggacgcactcccaaatatttccccccatccggaacctcaatgatctcctcatccccgtggataatccaataagccacttcatgaaaatctccaatccgctcggcatctttgctggctataataacgcctctctcatccataatattaatattatattccgtagactcccctgccttttcaataaacttttctgccaaaaaattatccagcaatgtaacatctccttcgttttacattttctatatattttagttcttttcatgataacatcacacttttttaatgtctagcagattataaatctggcatttttttacagtattttctattgtatcaatacaatttatctatcaatatttggtttcttaacccatgagaatattccctggctgtgatatactcaacaaaatcaaatagatccatttcccccgcagtggattcaaaaggaggactctatgactatcaaagaacgtattctggctactctgaagggggagcccacggatgctttgccatttgtccctcgcctggatatatggtacaatgcgaattccagaaatggtactctgccggccccttacaggcatgccacactaaaagatatcaccgatgacctggatttgggataccatgcaatcattccggattttaaggattttataaaccccgaggacggagatttggatgtaggcataggtatctatcatctaaagaatcacccctaccggataaagctccacaatgtcagacgcacccatcagcgaaccggagatggtattctaaaggtccggtatgagacgccaaaaggggatatcaccaccacagttgtgcacaataaagagatgaaaaaaaacgggattacactgtatgtaatccgtgaacatgccgtcaagtccccggaagactatgctgctatggcatatatttttgaaaatatggaagtaatccctgattacagcaattacacacagtttcagcaggaatacatcggtgatcggggggtagcggttgccttatctgccatgtgggcctcccccggtcattatctgattaaggaactgatggcttttgatacgtattattatgagcagtacgacaatccggaggagatggatgcttttatacagcaaatcactcccttttgccagaagctttttgatgcggcaatcaatagtccggcggaaattattctgtcaggagccaattatgacgcatcatttaccgcacccgcaatgtacgaggaatatattcttccaacgctaaggcgccagtcggaaatcgcccatagcagaggaaaattcatcgcaactcatacggatggagaaaatacaggacttctggaattatacaaacggtctggttttgatcttgctgattctatctgccctgcacccatgacaaaaatctcactggaggatacccggcgcatctttgacggaacgtgtaccatctggggaggaataccctctatttctgtattggaggattctatggatgatgtgacgtttcagagatttatagatcagaaatttgaaaatctgggacggggagatcacttgattttgtctgtagcagacactgtaccccctgccgctaagtttgaacggattctttatcttcagaaaaaagcccgagaatttggtgctgtaatgccttccttatgaatacaaaaaggcacaaatctctgaaaccatctgagatttgtgccttgtatttctccgaattattttaaaaacatcctcaaaagcttttcttttccagatgtatacggctgataccggatgggaagatcgatccagttgtatttttttaccatgctttttttatggctgaaggtatcaaaactaagtttcccatggtaacttcccataccgctgcctcccactcctccgaagcccatccgggaggtagccagatggatgatggtgtcattcacacacccccctccaaaggaaagactgcccaggatctttttttccgtctccctgctccttgtaaacagatagagggccagaggcttttctctctcccggacaaaagagacagcctcttccaacgtttcataggtgaggactgggagaaccggtccgaaaatctcttcctgcattacaggagactccccggtaatgtgatccaacaccgttggcgctatctgcagagtcttttcacagccgtatccgccctccagaatctcctccccctgaataagtcccagaactctgcggtagtgcttttcattgaccatcttggggtaatcagggtttttcagaggctctttccccagcattgcggtgatccagtgccgaacatatccaagcagttcggttttgacagaacggtgcaccaacagatagtcaggcgccacacaggtctgcccgctgttcagatatttgccgaacaccagccgtttggccgccagcttcaggtcagcggtctcatctacgatgcacgggctttttcctcccagctccagggtaaccggcgtaagattcctggatgccttttccattaccatttttcccacctgaacgccgccggtaaagaatatataatcaaaccgctgctccagaagctgggtattctccctgcggccccccaaaaccacagcaacatactcttccgggaaagcttcacttataatctttttaattacctctgaggttgccggggaataagcagagggcttcaggacacagcagttgccggcggcaactgcgccgatcaatggttccaggcacagcataaacggataattccagggtgacataacaagggccaccccatacggttccgggattacatagcttctcgagtggaactgagacaatggtgtcagaactctctgttctctcatccattttgccagatgctttcttgcataagaaagctcactcaaagtaagccctacctctgtcataaaggattcaaaggtagatttattcagatccaaggataaagccctttgaatctcctgttcgttccttttgatggaagcttccagccgttccagtgccttcatccggaacccgcagcttctggtctttcctgtatagaaatatgctctttgcttttttactaattcttcaatctccataaatacctccctgaaccttctgcatttatgcctggtctgatttggtaaccgtaagtatactccaactttcagggcctgtcaatttagtacgcttgttttagaagctccagaacatcttctacacccgcctgccggggatttacaatcattgctccgtcattgaccgccgtattcgctgcctgcagaaaatcctctgtctttacacctaattccttcaaggtaaggggaagaccgcaggcgttgtggagtctgttttccatattacgtatctcccttatgagctgctctgccctctccgccgcaggtgttctgctatagaggttgtcccccgccaggtacagcagcagttctccgtactcttttctgcatttttccaggttatattccattccgtaaggcaggagtaccgtcatagcgtcaccgtgaggtatatggcagacacccccaagggcatgccctaccgcatggacaatgcctaccatggagttggaaaaagcagcgcctgccatcatagatgcatttgccattgccagccttgcctctttattttttccgtttgccacggcttcctccagatacgtgcctatcatctttacggcagatatggcataggcgtcgctgagaggatttttctgaagacagctgtatgcctcaatggcatgacagagggcgtccatccctgtggaggcagtcatcctgggaggtaatgtctctgtcatacggacatccagaaccgccgcatccggctgaagatagtaagagatgaattccattttaagctttcttgcctcattccttattacagccaccagagtggactctgaaccggtcccggatgttgtggggatagcgacgaaggggatctgctctcctcttttcatactttcacatccgagaatttccataatgtccactgcatgctgggaaagaatcatccttgcgccttttgcggtatcgatcacggatccgccgcccaccgctacgatgccgtcgcagttattttccttataatagcttccgatacggttaacgatttccaaggaagaatctgcagggatatctgtatagatccccccaatctctgttcctcctgagagaagggcatccaataccacctggagggttccaatcttttcgagcatctgatccgacaaaatcagaggccgcaggcagcccaggttatccagttcaacaggtatattttccaaagcaaaagctcccgaaagaatcttcgcagagctctgaaattcataatattctggtatcatagttctatctttttcctttctctgatggacagtcagctggccccgccggccgttctggcagtataggtaatcttattctctcttgtcatccggtagcgtcctgacagaatcccccctgcaatgcggatgtacaagcccagggcactcatctctttttccgggatctcctttagaattcttcgggtgataaatttgggaaacaggtaagcttccaccagatccacacttcttgaaaaagacatggcggtcccaatatcccccttcatggtaaatccgtgggcagcataggcccccgcgattcccatctgtcctgtgaaaaccagaaaggcactgtcaacacttttaaactgaaaacaggtatcatagtcagactgtaccctgggatccaaccgctccaatcccctgccagtctttctgatatatagactcgggccattcttatgacactgcagacaataggtcattccatgtttccagctgtcaacctctctctgtatccgggaatcccttttatataattcaaacagccctccgtagagaacataaaggacaattccttctattctcttctttatccggttgctccatttctttttcatactcatatcgctcatagagccatcacctttatcctcattccgtttgcagaatatttctttattggtatctgttggaagtatatcatattttcatttgtacttcaattattttgaaacacaaaatatttgaagtaaaaaggggacaggggaagttgaaaatgggacacccctgccctgatttggggacgtgttctttttagaaagaacacgtccccaaaatacttctggcaacgctgattccgtttgcggatgcctgctgcagtcctctggtgacggatgcaccgtcccccactgcccgcagtcctttgatgctggtctgaaattctctgtccactactactttattggaatagaattttacttctactccgtacagaagggtttcatcgcttgcgattccgggcgttactttatccaaggcatcgatcatctcagcgatatctaccatgattctgtggggaaataccagggacaaatctcccggtactgcatctttcagggttggaatgaggttgtttctgcacagccgctcttctgtcgtacgcctgcccctgcggaagtctccgaaggtctgcaccatgattttaccatcgcagagcatgttgctcagctgggcgatctgtttgccgtactcgatgggtgtcttgaagggcttcgtaaagtttttagacaccagcagagcaaagttggtgttattagtcttatattcctgagatttgtaggcatgtccattgaccaccgccaatccgttttcgtagtattccgtggcaacctcaccggaagggttggtgcagaaggtacgcactttatcgtcaaaggtaggtgtgtggtataccagctttgcctcgtagaggttcttattcagaaaatccatcacctcgtcccgcacctccacacggactccaatatctacggttcccacattagtctctattccgtggtcccggcagatatggctgaaccagtctgccccttcccttcccacggcggccacaaattctgtaccttcatagcgttccccattgtctgtcactactgctcttgcctgattgtctgtaatctcaatatccgtcaccatggtattgaatttcatcacaatcccttgttccagcagaaagtcctggagacggtgatagatcttgtatccctcttccgtaccaagatggcggatgggacactctaccagcttgagattagccataattgcttttctgcgtatctctcggatctctgcctccttgtccacaccgtacacctttgtgtctgccccgaatttcagataaacattgtcggattctttcaacagtttcacagtttcctcataccccagaatctcaggaagattcccccccacatcaggagataaagacaatttcccgtctgaaaatgctcctgctcccgcaaaacctgtggtaatggcacagggctgacatcccatacacttattcgttttccgtttgggacactgccttttttctatagagcgccccttctcaatcatgagaattttcatatccggtttctgccgaatcagctcatatgcgcagaagataccggatggtcctgccccgataataattacatcatatttgttgcatcccatttgtgtctctcctttttctgtctctcacagcagtaagctgcccgacagtctgcccttcgaaaggccgtcctgacgggcagcttactgctgctctgtctgttccatgtaaaacgcctctcagccttctacaatcagatactgcccgttgggcagtttgaatacttcgctggcttcctccagctcatcattgctcatggtttctacatccatcccgctctcgtcaaaatatgcccggacttcctccatggaatccaccacaacagccatgcagtcttccagaaacgcctccgcttcttccaaggtctctgccactggttcgtcaaataactgatcctgatgacttaagaaatacgccaaacactcatcactgtactcttccattatactctgcctcctttttctataattttctttaacacaggttctactctctctgcagaatatctgcagatttgtcttaccccttcctgggcattggtcatagcgtaactgtactttaccgcctgcagcatttccacatcattatagtggtctccaaatgccatacattcctccggccggatccccagctgtctctgcagccgttttatggcgctgcctttattcgcccccacaggagtcatatccagccagacattgccggatgtgactacagttacttttgatccgaaggtttccttccagtaatcttctgactgagcaatccccctttcgtcatacaccgagatcttcatatactcttcttctactgcgaaaatgtcgtccacaacggttacatgatttttgacaacattgaccatgtgataataatatgcggggctcttcggctgaatataacaagtacgttccccggataacagaatctctgcattgtccttattccatatggtatgcatgatctcctgtcctaattctctgggcaggatatctttatgtaatattttattcttatactgtgagagacacccattttccgcaatataggcgatctctcccctcacaggtgcaaacagtcgctccagattcggaatctgtctgccgctggcagctacaaacaagattcccatttgcgtgagccggtgcaccagttcccacatctccggttccagatcacgtttcccgtcctgcaaaagagtgccgtccaaatcgctggctatcatcttaagcatactttccatcctccaggatctccaaaatctgctccggatagtctatcaaaaacctggcgtgatgttcccttaattcctctgcgggccggaatccccaggtcacccccacggtatccattcctgcagctcttcccgtatccatatctgtattcgtatctcccagatacagacattccccaggctttacacccagcttcttagcaagatacaatgcaccgtccggcgacggctttctgggaatttcttctgtctggccctgtatcatagaaaagaaattctttccgaatattgtctccaccacatgaaccgcttccaggtggggtttgttggaaaatacggctatctctatccccatactcttcacagtctccaaaaccgggcaaatccccggcataggctttacatgatataagggatccatggcaaaccactttcgaaaaagggttttcccctccctgtagtgcacccctgcagtatccccggctgctgccagagctctttttagtgccatatccacaccatctccggcaaaataattataatccctcaccggctgaggagtcaggccaaagtgttccagtaccatattccctactctggcaatagactctaccgtatccgccagtgtaccgtccaaatcaaatatgcacaatttatacatgggagaaccctcccccaggaaaccctgcctttttcaattcctgatacaggcggctgaccggaagcccaactacattattataatctccccggatctccttcacaaatacggcaaacttcccctggatcccataagcgcctgccttatccatgggttcaccgctctcagcgtatgcccgaatctcctctgaattcatgggataaagtgtcacttctgttttttctgaaaatgtacgaacctcactgtgtttccccttccggacgataaaagtcacacccgtatagacctcatgggtttttccctgaagactctcaagcatttcttccgcctcctgctttgtcgaaggctttcccaaaacccttccccgaaaaaatacgatggtgtcagcccccagtatgactctgtctcccagaactttttcggcaatgtctctgcactttagaaaggataactcctccactatctcactgggttctgtctttgtaattatttcctctgcatcactcggtcttacctcaaaggaaattcctgcctgctgcaggagttccctccgtctcggcgatgctgatgccagtatcacgggttccatattaacatctccttgtctgctctatcactctttatattttctgctctcctgaactgttagtcagaaacaggacaacctgccatccaaccatattatatcctacactatgacagcagacaagaactatggcgtatcctgtccgattatcacctgattctttcccttttgtttggcctgatacagcaaaacgtctgcctggcggatacagtgctccaacctcatagtctgatccaatgtctgtgtaaccattcctgcactgatggttacatagggtaatggagcctgccggttctccagctttctctgttccagatccagccgggctttgtttactttatcagcgatctcttccccgtcctttcctgctataatagcaagaaattcttctcccccatagcgaagcagatgacagtccggcagattcagatgggacttcagcagtcctgcgattaaggcaatgcagtcatctccggcctggtgtccataagtgtcattatatatcttaaagttatcaatatccatcattacaaaagtaacctgtctgctgtcttcctgatactgcttccagacctgaggcatcacttctttcagataacgcctgttatagagtctggtcagttcatctgtcaaaacctgtatgtgcagcttgcggttcatttcctcaattttctccttctgacttacaataatttttctggaatgaaaggtttccagtccattattgtatctcatagccgcaatcagcactgccatgatagttgcacaggccgtattggtatagttccccatgttgttcgtaggtaccggctggaaggtgggaaacaggagcatcagtattatctggttgatgccaagaacaatcacagcctcccagggacggtaactgacaaatatagaaacggaaagtacaatgcacagatatacacttacattctccgtcaccctctgatcgtaaagagtcacagcagtaccccacagacagaacaggccgctttccgccactgccagctttaaactgagtcccgcaaatctgtccacatccctttcaaatatcaggctgagcacaaagccagccaagctgatggtgaaaaggaggatgtacagtacaaaatataccctgtgagagtgcaccgacagcccaccgtcacggacgcaggccatcatatacatattgaacagctcaaacaccattaccaacactgacaaatacttgcagttcctaagagtatggactgcccgttcattctcaaattcctggcgcatttcttccgggagggtcttcgtaaacactcttattaatttggccgtcatagcttgcattcttatcctatcccccctattttatgagcagaatccttgtatcacatttacaatacatgtgcttttagcaaaagtcaatacttcactggcttttctacagccagcctcctctaagcctcaaaagggaagcgcattccccaggattccctgatctcatccattactttcataatcctgatggtttccctgtgaggcatctccggacactcgattcttccctcttcaatggctctgattgccgacagcacttcatattcatagccggtaatctgttccggcacctggtagacagcaacttccttccattccagggagaatacacttaccttctgcggattgttgatattatcaaccaccagatatcctttttccccgtatacaattcccctgcggtcggtctgtgccagcatggttgccgccagcactgccatctttccttccctaaagcacagggtaatactgtccatggcatccactccggtatctgtcatcactgcagaagaactgatattcgttatattttccccgaaaatcatagacgcaaaattaatcggatagacagaaagatcaagcagtgctccccctgccagctccggacgtatcatacgctcattctgtgacacaagatatcccagattcgccgttaaaagggtaggtgttccaatgactccgctgtccagcacttcctggatcatggataccgacggcatatatctggtccagattgcctctgtgagcagcagctttttttcttccgcaaaggcaatcatttcctctgcctgagcggcattggcagtaaatgccttctcacacagtacgtgtttgccatgctgaaggcacatcataccgtgagcaaaatgatgagaatgcggggtggctatgtatacaagctccacctgcggatccttcagcatatcctcatacgagccgtaggcacaggtaaatccccatgttttcgcaaagtcttccgccctttttatatctctggctgcaacggcatatgcttcagcctgtggcatctccgtaattgtttttgccatcagggctgcaatccctcccgctcccagaattcctatctttgttgtcttcatgctcgtatacctcgctttctttatttccttctattctacacaaaccagcgatattgtacaacccttctgcgcggcaaaagggcatagccgaaatgactatgccgttctgctgtatcatccttctttattggagcgtatctttgttccttccagtttttatgtctgtacaactgattcctatcccatccagaatacccggttctgtttcccaggcaatgctgtcttcacactgtactgccagtcctgcacagaaagttcccaattctgccgcacttaaaagctctgtctcctccaaggcagactcactgctgcttttttgaagaggcagccccagacaaagccctgtaatcgttccccccagaaaagcatctcctgcgcctgtggtgtttttaacggaaacctgagcagccggcagatattccaggcggcgccctgccatggtatatgcgccatgttttccaaaggtaaccagaagctgtatctcaggatttagtctctccacctgctcatacaatcgcagaaccagctcatccccgaaactctcctgtgtgtctccttccctctctttgtccatagcactgagcactgccctggcctcctcctcattcactgccaggagatcgcagagggtaaatgcatctgcctccagaaatgtttccgcctctgccgcaggaactgaaagtacgcagaatgcccctctttcctttccctcccgcagcagagcaatcctgctctccgcagagacctccggaatagccgctacaagagtgttggcgtccacggacagtgcttccatactggacctgatatactcgggggttaccctggaagcagcactgttgatgactgtcatattgcagccttctttgtccgggtactgcaggcatacactgagcatggtcctgagttcctccgacctgcccatatattctgtgtgcattccggcaaacctcatttcccccagcagttcctcgcccatggtatcctgtcccacataactgaggggatagacctccgtctgctttcctatcagggctgctatataatgaaacacaatatgcagcttacagtagtctctggcaggactcatatgtaccaggcgggactcactgcgtcccagggtatcctgtatgggactcagaagcagcattccggtccccacaccgccggttcccactaccttgtcgaatttcatcccttaccgtcctttctgctggcggcaatcccccggaattcccactccggatgctcgctgataggatggcaggccgtctctcttgtagcagtgatcagggcatccggatgttcctgcaggagagtcatagggtattcttctgtaagaggcgaaaaaagtgctacccgcaaagcggtctgcttccatgagcctgttgctgaatatactctgattttttttgctttcagacattcctttgcacccagggtcacagacataggaggcataaactgccagccagccccaaagctcctctgggccagggcgatcatagtatcaagattattttcctgaactctggccgtggaattgcggatatcgtcgatagtaaccacagaatacggacttctcttcgcctgattaaaggcaatatggccgtcctgtccccagcctcccatggtataatcgatctccgtgttctctatctgttccgacatttccttcacattgtccggcgtcagatagtgccggttttcttccttaaccctgagttcagggtcaaccgcctcataaaaataggtatgcataaatgtcctgaaattgctgggatcctttttgggaagcagttttccctcccaatccagattctcatccatatgaaaacagatcatatttttcaaagaaatcctctcttcatttaccattcttgcaaatggtgcgtaccactcttttggtccgcagggaacaattaaacgaaagggtctctgctccagattggctgcttttatctcctccgccaggtcacgcgccatcacctccccaagctgagccgcatcctctacaatgcgcagaggaaccttacggtccttatggtccagaagctcttccataggaatgctgcaccattcatataacttattcaaatccatcataatttttctccttaaccaggctgcctgtgtttctcttttctcttcctacggcagatatctttctgcttttacttttggccaggcatagcagggggtaaaagcctccgcatagccggctccgcactgaagcccccggtaacgggcacaggtactgacaaactccgcaaaatcaatgccgtcatggtctttcatccacgtcagctgactttcatgctgcttcagcatttccatcttctgctcatacgtatccgtaatgtccacatattccgttggaacaaaattaagccctgccagggtatccatatagtaaataggagtcagcgtctcataataagcttccctggtggtgtagtgaggcagcgtagagacaaatgaagcgtcaaataccagtttgctcaccgccacgtggtccggcatatagtcattagggctgtgggtgataatcacatccggtcttgcataccggataatgtccatcactttttccctgtgttcccgcatatctccgtagatacagaggtcatcaatatcacaggtaagtccctcggccccaagaagagcagcggaatttaaaaattccttcctacgtatggctcgcagctcgtcaggcataatcaccgcatgcccctggtttccgttagacacatggcacataaatacatcccagcccatcttcttatatctcgccagagtcccggcacaggatatttctatatcgtccgggtgggcagctattgctaaaacccgcatatctttattcctcctcttcctgctctgcttccagatctgcaagcatgtggtcacacattactagcatccttgtcacatggaacagccccttgtatagattgctctttattactggctcctgccactttccttccctggtgagatatcccacccactctccatattccgggtctgaaaaatgatcaaaggaatactctgcaagggtgtggaaccatgtctcatatttatcttccttcgtcagggtatatgctttcagagaagcaatcaatgcctcactcaccggccaccagagcttcagttcatgctcatactgttctacgggccttccctctatgtctacaaagtacataattccgccgtactctttatcccagccatgcatcatagaccaatcaaatatattcagacatttctcaatgacatcatctcccagtcccatagcttccgcctcctggatcaaaaaccagcaggcttcaatactgtgtccgggattaatggttctgcccgcaggctcatcaatgaattcgccatttggacctacattctcaaacagagcctggtactcctcgttataatggtactgtaacaaatcagatatgtattttttgctccgggcatcgtacttctccttgttttcgggatcgcacttgcgcataatagaggtcacattcagcaggatcatcacattggccaggccccgcatagggcgtacctccgggttatacttgggcggcattttgaagggatcgctgtctggattctcataaagctccactaccttgtcgtagacacgcctggcatcctgcagcgcttctttgtcaccggtggccactgaatattctgcatttcccagtatatagaaggtctcgctgaaaaagtaccgtctcttgcgtaccggtctgccgtctcttgtcaccaaaaaatacattcttccgtctgtgtcaaagcagtgctggttcataaagtccttgcagctttttgcaatctccagccattccgggcgcgctccatacacattacacagataggaatatgtccacaggactcttccctgaaaccatacccctttgtcactggaaaacggttttccttcccgatccaggaatgtgggcatgcccccgtactcccgatccagcttgttcccccagaagggcagcatacggtcaaacaattccctctgcatcattttccggtattctcttatcttcgttaattccatagtctatagccctctctttttatattatttttctatggtgtacccagttttctccagtacttcatgaaccatgtgtattaccttcactgcttcatagctttcttctccggtgatcggaggaattgtattctctgcagctgccctcagaaatgcccgtatctcacgccccagatcaccagacggcacatcgtttaggtcatccggctggtatgaggtatcaaaaaatctgcatccttctccctccataggggcaaatgatacctccgaaaatcccagttccagctccagcatgcctttgctccccacaatcttcataccggtatccacctgtgaactgtgctgaaagggaagcagccagtgattctccatcacaaccagagcatcattatccataatcagatgagaggaggtgtaatcccaattaggactgttgtatttaaagccattggccgccgcaacctttttcacctttaaacctgtcatccaaagaaccagatcaatgtcgtggattcccagaaaccaggcaatgctggttcttttccccaggcgggcggcattggctaccgtattatttctccagatattaatgtgcagtatctcgcccagctttccctgatcaatggcacgttttgcctgaattgctctggggtcaaaacgcagatcatgtcccaccatcagataggtaggatccgggcgctttgccagaatctcttcacagtctgcgctggagatggccaaaggcttttctaccagaacctttactttgttctcaaaggcctttaatatcaaatccttgtgcagatcatccggagtgcagatactgactgcgtccagcccctgtgcaaacagctcttccggggttttgtaaacctccactttaagctgttcctttacctcctcccttcttttgtcaaagctctctgcacaccctacgaattccacatccggctgagccagataaaatctggcatgggcatcccccatgtaacccattccaataacacctgttcttagctttcccatacgattacctccatttttatataattttgttttattgcctacaaatcatgctcgattaccagattcctccctaactgcaagcccccgtaaatggcagaataaggcgctgccacattcagatggggctctcttttcagcacatttttctcccgcagcatacggtaaaagggctctgtaaaccactccttaagcagtagaatccccccatcaatcaccacagaattaatccccaaaaggagcataccgttcacggcaatggttgctatgtgggttgtcacactgctgatttctgcctgaagccatgcatcttttcccgctgtctctgcgataagctccagggtaacccgttccggatccccttttgttgcctggtaaaggctgctgtctctgtgagtatccagcttttcctttacactgcccagcagtgcagacagggaggcaatcgtttcataatctaccatctcccagctgccgtcctccctcaaaagcgtggcatatccgatttcccctgcacttccgtaagagcatttcagcaactggccatctacaattacccccatacccagccctgcatccacacggaggtacagataattttccggtaactcctccctcttgcagagagcctggtatccaagggccgccatgtcaatatcattcatgactgctgtggcacagccgaaccgttcctgaaacatctcccgcagtggaagatccgcccatttttttgccattttggccggcttcagtatccttccgctgtcgtcgtataccactccggggttggcaagggccagacttcctatctgttctggggatacctgatttttgttcaaaagtgactcaatcttacccataatatcttccatcatctcatgtgctcccaccgcctccgtaatctgatacgtgtcagaggctatcagatggtaacacatatcccccagactgatatccacaagctccttacccagatctacgctgagaaggcagcggaatctgggattcacattatacaccataggctttctgccgtaagaagtctcctcattatgtgtctcctccacaatggcccccagtttcagcagttcatccatattgctggtaacactgactacactcagccttgtcagtttcgatatctctttcttggtcagaggtccctgattcagcataaggcgtaggataacctttttgttattatccttaatatgcttctgacttcctgtccccaaccctctgttctccatttttttcatctcccggctaatatatttaattcactttttaaactcactttattatattgtaattgtaactttttccgagggaactgtcaagtaatttcacatggatttacaaaaagggacaggccgggggccaaagggggacgtgttctttctagaaagaacacgtccccctttggcccccggcctgtcccttcagactgtagacaaagtccgaggacaagtgcctcggattttcttcgccattgagccagaaaagtcagcacttacaagactttgaggctcttttttggtataatagatgtatcaaatacaggcggtgagatgcttatgatgacacagaatgcggataaaaaaagagaacagattcagttgttttgcatggatgacatggttccacaggaccatctgctgcggatcatcgacaaagcaatcgactggtccttcatttatgaactggtagaagaaaaatacagtcaggacaacggacgccccagtatggaccccgtcatgctgatcaagattcctttcatccaatatctttatggcattaaaagcatgcgccagacggtaaaagagattgaggtaaatgtcgcctaccgctggttcctcgggctggatatgctggataaagtgccgcatttttcaacctttggaaagaactatacgagacgctttaaagacaccgacctctttgaacagatattcgagcatatcctttctgaatgctacaaatttaagctggtagaccctactgaagtttttgtggatgccacccatgtaaaagccagagcaaacaataaaaagatgcagaagcgtattgctcatgatgaggcattattttttgaagatctgctgaaacaggaaatcaatgaagaccgtgaagcacacgggaaacgtccgctgaaagaaaaagaggatgacagcaatacaccatccggtggagccggcggcaaagaagaaaagacagtgaaagcaagcacttctgatccggaaagcggatggttccgcaaaggagaacataaacatgtatttgcttatgcagtacagaccgcatgtgataagaatggatggattctcagctatagcgttcatcccgggaacaatcatgacagcagaaccttcaagtccttatatgacaagataaaagggatcggaatagagacgctgataggcgatgcaggatataaaactcccggtatagcaaaacttttgatcgatcaaggagtcaaaccgctcctgccatacaaacgccccctgacaaaagagggtttcttcaagaaatacgagtacgtttatgatgagtattacgactgctatatctgtcccaacaatcaggtgctgacctatcgaacaaccaaccgtgagggatatcgggagtacaaaagctgtggaagtagctgtgcaagctgtgcctatcttgcaaaatgtacccaaagcaaagatcatgtaaagacggttatgcgccacatatgggaaccttacatggagatgtgtgaggagatccgccaaaccgtgggtatgaaagaattatactcccaaaggaaagaaaccatagaacgaatctttggaagtgcaaaggagaatcatggtttccgatatacacagatgtttggaaaagcccgaatggaaatgaaggtcgggcttacatttgcgtgcatgaatctgaaaaagctggccaggatgaaagagaaatgggggcttctagagggagaagccccttacacaaactttatttggaacgcaatttggttaataaaagaaaactggctctgggatacaaagcccaaaaccagtttgtctacagtctgaagggacaggccgggggccaaagggggacgtgttctttctagaaagaacacgtccccctttggcccccggcctgtcccttttcaccatttacggtttactctctgacccagactgccttgcatatatggttttgctttttagaaaaaatcatttcaaaggctttctcgtaatcctccgggcggaaccgatgggttataacgcctttatgatctacctggccgctctgtaccagctccatggctatctggaattccggcttatctccggccatgcagtagctgctggaagccagcaccgacaactcccggtagagtatggttgacagagataccatgcttggacttgcagtgcccccaaacattataatctttcctcctacagcagccatctctactgcctgggaaaaggcattggaattgcctcccacacactcgtaagcctgatccactcccctgccgccggtcagtctcatcacttctttcaccggatcctcattgtcgtccagcacgatggaatgagttgccccgtatttttctgccatctgtgcctgatgtccatacttggcaactgcaattatcttggtaatacccatggagcgcagtacctgaatcatgttaattccgataatcccgcatcccacaacggcaacggtatctcccagctggggttttcctatcattgccccgtgaacgtttaccgccaggacatccagaattgccccctcctcataactcatagagtccggcattgggtatacatggttttcatgtacaatggaatattctccgtatcctccgggcagcatccgcttcataggcatgcccacatgtgacacgccgtccagacacagctgataccggccgctgagacacatagggcagcttttaccaaaatcaatgcagccatgaaggggttccactgcaacacgatcccccacttttacccgggtcacgccctcacccgtcttcaccacgtcaccggcattctcatggcccagtacagcaggaaacagtttgtccggcatcttatctcttgtctgcccccgaagagccatcaaatccgcaccgcagatcccggccgcacggttgtgtaccagaacccagccttttggggggcttggaatctctacttcttcataggataatcccttgggatagacgcttccatcccacacaatggccttcattttttcctttgccatttattctcctcctttatacacagcagtattgtttgagttctgccataacagctgaatcatccccacctttgagggttaccccggatatcacaggatagctgggaaggcttttggcaatgaggggaagatccttaagaccgctgcctgatataatacatactacagaatcgcccttttcgatcacgccttttctccgcagcttctgtactcccgcgatcacggaggcactggcaggttctcctatcacagcttcactggaagccatcagcttcagcccttccagaatctcttcatctgtcactgcttccgcgagaccatttgtcttccgtatgatatcaagagccgttaccccttcaaaggtctctgtatccgcaatggcaaaagcgatggttgatgcctcttcccagagctttgtagctttttggttctcccggtacgcccttacaagaggcgcacagcccgctgcctgaatccctgcgaatctgggaatatggggaatcatccccagccggaacatttcctcaaacccctggtatacttttcccagaagagatgccccgcccaccggacagaacacccagtccggagcctcaaactccatctgtcttcctatttcataggcgatggtcttatacccctgagaagcccaggggtgatatttcatggttgtgctcacattttcccagcccattacagggactcccttctgaacgaaatgaatacactctgcaatactgcactccattcctatcatcctggccccataggtctgtatctgccaggctctttccctcactgccgcggtgggcaggagcacaaagcagggcagttcacccttagccgcataagctgccaccgagccggcggcatttcctgcagagcccagagccagggatgcaactcctttctcctttgccatagtaactgcaactgtggaaaagcgatctttgtaagaaccgctgggattcagtgtttcatttttcaaatacaggtgttccagacccagcctcttacccagcccttcagccttcaggaggggagtattcccctctcccaggctcacaggccggatactgggttcataggggaggagcttctgatatccccatatcccctcctgacttcctgcccgcagcagccggcagaattcttctttctgctcctccagacggttgtctgaagctatggagcctccgcacctgggacagatatattcatctccctccccctcccatggagtattgcaggtcatacaatatagtgccaatacttctgcctcccttctatcctctataatagccccataaggctgcatcagcggttaaaatactgctgcagacgttttacggcttctctgatttccgtctccgaggaagcataggacagccttagatatccctctccgtaaatgccaaaggctgggcccggggtggtcaccacctgtacttctttcacaatatcagccgccagctgggcagaagtaagtccagtatcctgtatattcggaaatgcataaaaggctccaagaggacagcggcagcttacatttttgcacccgtttaatccctctacaagtatatcccggtttctctggtatcctttcaccattttttgtatggccttttccgtatgattcaatgcttcgatgcatgcatattgtgcggccgcgttcacagaagaggtaacctgctctatgatctgaaccatggcgcctatcgcctgttttggtccggaggcatatcccacgcgccatccggacatggcaaatgtcttggaaaaggtatttactgtaatcacgtgctccttcatatcaggaagagaggccggacttacatgttccgcaccgtcataaaggagacgctcatatggttcatcagaaattatggtcaaatcatgcttccgtacaagtttacagatttcctccatctcccctctggatatgacacctcctgtaggattgttgggagaatttagcaccagtacctttgttttctctgtaatcctctcctcaatattctcctttgtaggtacaaatccatctttttcataggcaggaaccggcaccattgttccgcctacaaatttaatctgttccggataattgggccaggacggaatgggcaccagcacctcatctcccgggtttaccgtaaccatcattgccagaagcactgcctctacccctccggctgtgacaattatttctgtttccggatccgcctgtatcttattttcccgcagtaatttctgggataatgcctcccgcagtccggggatccctgcgtttggtgtatactttgtatatcctttatacaaggcatctcttcccgccccgataacattggggggtgtgggaaatccaggctccccaatacagagattgatcacattatcatattcccgggccaattcaaacatagcccgaatcccggacaccgggggattcaatcctctttcgcttaaatgcatagtagtcctccttctccaatgaataaaatactatcagataaaatatccgtccaaaaactttcctatttcttcccccagatagtttaaaattttttctcccttttcccgggaggcgtcctgacatactcccacatttccgtagggagatatgtcccggaacctccgatataccgtcacacgattatgggcaaacatatccggatggtaccagtcgttcccctgtgccagggaataattttcccatccatcccctaccaggtgaggatacaatgccatcatcatagaggtctccatctctccggcatgtccgattccgcccaatgggctgtctctcagcgtctccataaactcagtcataaaatcccagtacctgagcattgctacagagcactggggaaaagcaattcccagttcatttacagccgtgtgcacggccggggaatttccaccgtgggacaccaccaggactgcctttgtaaaccccgcggaaatcacccctgacatcacctccgttatcatagctgcaagggtcttctgtgtcagggtaatactgcccggaaaatccatgtgatgggctgagaagccataagcaacagacggcagcagtactacctcccggactgcacgctctgctgcccttcgcatcacagcctctcccagatacacatctgtacccaggggcagatgcaggccatgctgttcacaggagccaattaccaatgccgccacccctttttcagccatggcagagcattctgatgatgcaagatctctccattccagtaacattcaatcgcctccaatcattaagtcctcgtggcacattagctcagatcttcaatggtattgattaccggaatctccagtccctctggtatataggcgctgctgtcctttaacccatgtccggtgagaagacatacacaggtatctccctgtttcaggataccctgttccttcatctgccggaccgctgcaaccgtagctgcagaggagggctccacaaaaataccctctttctgtgccagggctctgcctgcctccagaatctcactgtcctcagcggttaaaccatagccgcaggttttgcggatggcttccacggtaatatccccgtcttgttcgtatcccagcagaggatcactgatggcggaagccacacttctgggatttttgcagccgatcaccctgcggttttcctgccatgcctctgagataggcgcacagccctttgcctgaacacataccagcctgggcagtttttctgtgcatcccatgtccttcatttctgcaaagctcttatagattccataaagtactggccctgcgcctacgggtatcacgatatagtccggcacttctcccatctggtcaaagatctcgtatccgattattttatatccttccagaccaaagggacttagaaacgtagtggttacattcatatatcccttctcttgggccatctgcaccgccgcccggtaagaacaggaaaagtttccccgcaccttaataacctttcctccataggctatggcctgggctacctttcccacaggtgtggtctcaggcacaaagataatggtatcgatctctcccttggtaccgtaagcccctgtggcagctcccccatttcccgaggaggacaccacaatacccggacagccatactccttagccatactgacgcagacagataccgagcgatccttaaaagaaccagtaggatttgtcgtctcatctttgaaaaacagtccctcaaggccaagctcctctcccagagttctgctcttctttatcttagtgcacccctcctgaaaggtaactatgttttccttcttcacagggggcagtacccttcggtaatcccacatagattcctttccttcacccttcagggcgcgccccgcctctctgagatattctctctcatacgcaacggttaaaataccgccgcacttagggcaaagactttcctttcccataggaaagcgctcaccgcaggaatggcagataaaatacacttgttccatcacagttactcctttcttttatgcccggctgtcatgcagggatatataaatgttcaaaagcctctccggccatacgcagctgcatgccgccgtcctgcagctgaaacagtccatgtcccggaagaaacagatccactttcagatccatcacctctctcacacatctggcataggcatgaatatcagcccccggtatcagctggaagctaatctttccacccatcatcaccagatcaccgccgacaaagaacctgcgtcccttcacagttccgtaatagcagattcccccaatgctgtggccggaagcgtcaaaaagctccatatgaatgccatctttctcccagatacccggtacggccatctcatcccaccgacacgctgccagacggtaatccgggggataaaagcctgcatccctggccacatccagtcccatcacagcctcatcgcctctggcaaaggcctccgcctccgcctccggcaccactaccttaatcccatactcactctgcagacgggcggccgctccaatgtgatctccatggcaatgggtcaaaaacaaataggagatatcctccatccggaatccatctctttggatttccgcctccaaaagctccggccgaatcccgattccacagtcaaacaaggccagtttgccttcgaactctaccagatagcagttacagtccagctcatccgtaagaaaaatgccatttctcccgcttcccaccaggtaaacaccatccacaagcttcatctcaatcacccagcctttcttcttcgcacaatttcagtccatactcaaaaaaaggtgagagacagcactttggcctgttcaggtccaaaggacctgctgtctctcaccttctttcaccccatagcagggagcatcagctaatggtaaatcctccgtctaccaccagattctgtcccgttataaaccttgcctcatcagacgccataaacaacgccgcattggcaatatcctccggttcaatgatcccctggataggtgccacagtttcccacttgtgataaaactctgcatcgtgatccagaagctcatccaccataggggtccttgtagtcgaaggagatacacagttaacccggattccgtactttccattctccacagccatcgctctggtaaatgcaagcattgctccttttgtagccgaataggtttccgcaccgcatcccactacaccattgatggagcagcaattcagaatcacgcctcctccctgctgtatcatatgaggaattgtatatttacaggtaaagaaaatgcttctgatgttaatgttgaatacgctgttccagtcttctgtcggcacatccggtaccggtgaaaatttgtagggagatgagtagcccacaccggcattattaaaaagaatatcaattcttccatatgtttcaatggctgtatccaccagacgacggatatcctcttccttctggacatcccctaagacgtagatgccttctccgccggcgtcctgtaccattctccatgtctccctggtattctcctctctgcggccgtgtattaccaccctggctccttcccgggcaaatcggagggctgacgcccttccgattcccccgccggctccggttataatcgcaactttatcctttactctcatgtcatcgtactcccttacatcatcagttcagatttacactgacacatctttcctcgctcatctccagaatagaccatttaccgccgcttcttccatatccggactgacttccgccggctccccctgcagggaaggtccaatcccagtaactgcttccggaattaatatttacatagccgaaacgcatttcttctgccatctgcataccttttttcaggtcttctgtgtaaacgcccgcagccaggccatatggactcatagctattaagtccataatctcagactcctcttgaaaacgcaccagcggtactacaggtccaaacgtttcttctatatttaagagggcatccttggatacatgatcgattacggttggatataaataatgttccgtaggcgcaccttccaccttgccccagtgctcgcttactacctttgcacctttatcaattgcatcctggacatgctccattacagtgtcaacggtgcttcggttatgtaccggtcccatggttgtcttctcatccattggattccccacgacatagcgatccatcttagacaagataatcttaaccagttcatcggctacgctgtcatccacaagaacacgctctgtgctggtgcagatctgaccggcattgccaaagctgcccgccagaatgccttccgccgctttttccaaatctgcgtcccttagcactaccacaggtccgttgccgcccagctccatgagggactttttggcttttgctttttccatgatgtcatttcccgtcttcgtgcttcccgtaaatcctatgccggctgtcagaggatgcaccacagcagcagtctttgcttcctgagaagttccgattaccatattgatcattccttttggaacctctgcctcctcgaaacatttcataaacaggctggcaactgcagagcagctcataggcggcagccaaagaatcgtatttcccgctgccagccccggtgccagataatagcaggatgccgtgcacagggggaagttaaaaggagtgatgatggtaaatacacctactggttttctgtaagcgtaaacatgcacgttcttctctctcacagacggaatctcagaagacatccatttaatctgttcagctgcatccctgaatgccagagcgcttccgccgacttcgccaagcgcttctgtatgataaggcttgcccatttccatggcaatcattttagccagttcctctttgtgcgcatcgatggcatccgcaattctaaaaagcatctcggatctctcaaacactgtcattttttccagatttcccttttcccgatccgctgccttcagcgcacggtccacttcctcaaatcctgcgggagtaactgttccgattacttcccctgtggccgggcttactacgtctctggaggatccctcttttgtataccattctccgtcaatatacattggataaatcatagcttctgtcccattcctttccgcttgaatcacttatttgttacccagccattccagtgcctgtccccagaactgtccgtaatattcccatggctggaaggatgctgcccagtggggagaacagtcgctggcaaacgccattgcccgtccttttccatactcccaggtcaccagcagcggatactgatcctcatcatcgccgatggtagccagtacatccgcaccctcttttggaagaattttattgaagccttcgaatcccggcgcctcatcccacggaatatcggccagaatcggatggtcttttactttaatatcaatggttgtgccttccggcatctctaccctgtcatcaagtcccttcagacaatttacaggcagtgcctcttcaatgggtgtatcataatatccgccgtgtccaaaacgtccgctgaaagaagtccagccgccgatcatcaaaaggccgcctccctggcgcacataattgcggatagctttcagcctgtttgtggtgggctgaggtacggaatcaatccagaaaggatacagtgacaacacttcacactcacagtcactgatgataagtgcatcgtacttggataattcctctacggtccttggaaagtcaccaattgcctgctcaccggtcatatgtgtcacttcatggcctctgctggtcagagcgtcaatcaaaggctgtccccagatatgatgggtcatcccttttacttccagattaaatggggaagccataaaaataggtccgattttggtacaagcgtctcctgcgtataaaattttcatataaaaccctctctttcttacttacatagtttataataaatttaatagttcctcaattgtctctgccgtcggcggttcctgctgtccggaagggatactgctctttagtccgctgcccgtagcaagggatatgatcacatcattcttatgtaataccccctccagacgcagccttctggctgcagccactccggcggctcctgccggctcagtgtacagtccttctcttcccattaacgccctggcttccagaatctcttcatctgacacgataacagctctcccctggcttttgtaaatacactccagggtatacgcaccgtcctgggtatagcccttaagctcatcgttaagccccgaagctatcgtaggtcttgtcatattccactcctgcacatcccatgcctgtttaaaataagcatctgcgatgggataacagcagtcagactgcactccaatcagcctgggaatcttctccaccacaccttcttccttcagcttcagaaatccatggtagatgcctcccagaaaaggaccggctccgatgggaaccataatccagtctgccggtttatccagctgctctgtcagttctctgcatattccttcatagcccgcccacacataagggttaatatatgtggtggtcagattataccatttcctgtcctgggccaccgcctttgccccctgaaaggaatcactgtaattccctttcatgcggatcaccttagccccataggcagctgcctggcgtaccttttccatggaagtggatgcaggcacaattgccgtaaccggcattcccgccctggaaccatacgcagctgccgaagcactggcatttcccgcagaggcgacgataatcttttctactccaagttctctgctgtgtgccaaagcgaaggccatccctctgtccttaaaagaacctgtgggattcatgaattcacattttatgtaaacttcatccaaatccagctcctgggcagacctcaacagagggatcaggggcgtgtttccttcccccatcatacggtgcggctgttctgcctcctccggctcaaagtgaaggattcccccgcacttgcagcatgcataggcaggcttctgttcctgaactgcattgcattttacacagataagtttatgtctcacggtaagccctcctgttattcccttggatcttatccgccggaattaccgctcactgatatagcagtaaatcagcgctgtaaataatttcatacagtctacaatatcctgttccctgcagaattcattgatccggtgtgcctggtccagggaaccggggcctaataataaggtaggaatatcgcaaagcacagagaacatacttgcttccgtacaggcacggaacacagataccgctggttcctgttctgtaattcctgccaaaagttctctgcagtcctctaccagaggatggtcccgttcaataaggcttgccggaaagaacgagcggtccaatacttctccccactctcccactgccttctgcaactcctctttgatcctgtcaggggtctccccgggaagaagacgtctctccacctcaatctcacaggcatccggcactgtattcaggcggattcccccttttatggttccgatacagcaggtagcctgtcccagatattcattctgaacttcactcagactgtctgcataggtttcgattctcctgatcacttcccccatcttatagatggcgttgacgccgttccaaggttcactggcatggcagcctactcccttggttttcacataccaggaactgaatccccggttgcccagctgaatctcacattgtgtaggctctgcaattacagcacagtctgccttcaatttctttgtggacagaatatggcggatgccccgattcatatcctcctcgtcgctgaccagaagaaccatgattccccgtttgggctctactttggcagagccgatcaggcttgctgccgtgagtattgctgcgcatcctcccagcatatcgcagctgcctcttccgaaaagcacaccgttttctctctgtgcaccggaaggttcccgctcccactcaccgaaggccgggactacatccatatgcccgttcagtatcagtgcaatatcctcagggtctccatacgtagctgttacattgcagcgattgggctcaaattcttccacctccacctgaaaacctgccgtctccaggatttcggcagccactgctgctgtttccttctcatttcccggcggattataggacttacagcgaatcaggcgggcggcacaggtgatggccgcctcctcccattcttttgtcatatgttccctcgtccaccggatactctgctctctctttgcctctgttttcatacgctatgcaacctctccagatccggattctccggaagcagctatcatgatctcatcctgtgtcaaatccttcacacagtcaaattctcctgtctttcttccctcatagagtacaatgattttgtcactggatcccagaacctctggcatctcagaggaaatcataatgacagcaataccatttctgcacagattttctattatcttatgaatctctgccttcgcccctacgtcgatccctcgggtaggctcatccagaataataatctgaggattcctgcacagccatttgcccaggcataccttctgctggttaccgccgctgagctttccgatcttctgatccatagatggtgtttttatggacagtgcatctatgtattcttctgctatactggtttcctgtttgccgtcaatccaggttgccttgctcacccatggaagggatgccagagtcatattctctctgatagacagaaggggtacaattccctcccggcgtctgtcttctgacacataggcaatacctgatttaatggcgtcaaacgggttgcggatatccagcttcttgccgttcagatatatctctcctccatccggcttatccagaccaaagatacatcttgcaatctctgttcttcctgcgcccatcaggccgctgaagccgagaacctctccctttcgcacggtaaagctgataggctcaaatacccctttgcggtacagatccttaacctcaagaaccacatcaccgggctcaaatttttctctgctgaatacgtctgacagctcacgccctaccatgctcttaatgatcatatcctccgtcacttctgataccggagaggacattacgtacttaccatccctgagtaccgtaatctcatcggcaatttcaaatatttccgacatacggtgagagatgtagataattgccattccctgttccttcagttcctgaataatttcaaaaagtttttccttttcagcctctgtgatcgctgatgtaggttcatccattacgataacccaggagttagacccgattgccttggcgatctctatcatctgctgctgacctaccgtacaatcaccgacctttttgttttcgctgatattcagattaaaccggccgattagctctctggcttttttctccatatcttttcggtttacaataggacctgttcccttcatctccttgcccaggaaaatgttttgtgtgatactaagctccggaacaagtgcgaattcctggtaaataaccgagatccccagcttctgagaatccataggagaatggatggatactggctttccgtcaatatagatttctccgccgtcttttttgtatacaccggataggattttaattaaagtggatttgccggcgccgttttctcccatgagtgcgtgtaccgtacctcttttgaccttcagattcactccgtctaatgccttcacaccggggaactcttttacaattccgcgaagttccaattccttggcttcttcaatagagatatcattcttatgacgggaatgaacctctgcggcagcagcttccttttgggccttcttgtccttgctgctaaccttcactctctccttgctgctgtattgatccatatagacagatactacaatcagcagacctttcactacataagaatagtagggagagattggcatcatacccagacctgtaaatatcgttccgataatcacaacacccagcatggtaccaaccagagatccggtaccgcccatcagactggtgcctccgataacaacagcagtgatggcatcgaactccatgttctgacctgccagaggctgtgctgagagggcgcgccctacggttaccaccgatgcaaagcctgcgaataaaccgcctaataaatatacaattactgtatgtttaattactttgattccagatgccctggatgtgacagcattgccgcccaccgcaaaagtctttcttccaaaagttgtcttgttcagcaccagatacataatcacaaacaatactgccagatacagtaacgatgccggaaaagaaccaaagatatttttctgtccaaaccagttaaaatagtcatttcttacaactacacgttttgagtttgtcaggtaaatggttaatcctctggatacagaggtcatagctaatgttgccatgaaggggcttatccccagtccaccaaccatcaagccgtttgcagatcctgctgcaatacctacaataatacataccagaaatccgcacagggcggttcctaatccttcacccccaagagactgcattacaatagcgccgcatgccccggcaagggcaatgtttgcaccggatgacaggtccgtacctgccagcataataataaatgtaatacccagggataaaattgccaatgatgtgttttgacgaataatattaaaaaacgttctcaccgagaagaagcccggagccagaaatgagaaaactactattaaaatcaaaataatcgcaagcaaaaataggtatctcttgatctgttggttttgaaatattttactcttacttttgtccatgctctgccttctttcatgcctttttagaaaagaatatgcggcagccatgaaattctgccgcatattcttttttcagcctatcttgctaacttagaaaagaaatccctattatttctcttcaaaagcagacaaatcatcaaataactcaatacccttatcaggatttacgatgttcattccttcgtagccaattcccagttcttctacttttgctttcatatcatcgttcatgataaaataagactccagatagttcttctgttcaacagtctcgccttttgccagtttagagccgatctgaacattccagtatccaacacgttttgcacctgtcagcagcgtacatacatatttgccgtctttcactgcttcgctggcgtctttatttccgtcatagctggagattaaaactttacctgtcagacctgcctgatccactgcctgtgcaactgctgttgtattgccgtcagagaagctgtggattgctttgatgtcaggatttgctgcaagaatatcctgaacagttttcagggttgccgctgtatcccagccaacctcgtagtatgtacacttgatgtcagggaattctgccatagcttcttcccagccgccctgacgctcgtcagatacgaagttaccggttgcaccgtaaagcattgctacatcaccggatttgtcgatgagatttcctaccagttcgccaatcactttagtgtcttcacggtcattgtacagattggaaataactgcgtcggaatcaataaagttacccatggagcatacagggatacctgctgcttttgcttcttcgcagactggaattaatcctacattgtcatagggatccaacaggatacagtctactttctgctgaatgaagttttcgataattgcaatctggttgtccaggctgctgtctgcgctcttccagatcaggtttacaccgtagatctcagcagcatagtctccgccctcgatcatgttaacgaagaattcctgagtcatgtccagcatagcaataccgatggtgggtttgtctccggatgcctctgtgtctttggcatcccctgcggcatcatcttctgcaggcgcagcgtcttctttgtctgtttctgcgtctgtggaagtggtggcgctgtcatcactagagccctcgtctttgcttccgcatccggcgagtgttccgaataccagcgtaaatgctgccagcagagccaaaccttttttcattaattctttcttcttcattccttttcctccttttttaagatgaagttttttataatatattcgtcaaatatattatcccgattaagctgcaaccttcagcctgtcggccagtttgccgatgcagacgtcaaagatcaggatgcagatgatgatgatacctttgattacttctctcagcaagaaaggtacctgaaggaaattcagcatcgttgtgatcaatgtaatgataaatgccccgattaccactccgaatacggttccttttccacccagaagacttgttccgcccacaacggcggccgcaatcccgtctaacaggaaatctcctgagatattagaggtaataactgttacctgacaacaggtgatgatagctgccagcccgtacaggaaccccgctacggtatagaccagaatcttataaaagtttttattgatgcccgaatattctactgcatcttcattcccgcccatagcgtaggtatagattcccagtttggttttgttcataatgatatacatcagaactaccgccagaaggaaaaccagaaatgatacagggataaatttcagtatccttcctgagcccagggtcagcaaaaattcgcttttaatctgtacctgacgcccctcagaaaccatcatagacacacccttgcacactgacatcatggccagagttgtaataaagggattcagattcaattttacaataatcagaccattgatcaggcccactaacgctccaatcagaagagacgttataataagaagaatcccctgatttccgctttccagatatacaaaacctgcggtaacccctgccagagataaaccgaaaccggcagtaaaatctattccagccgtaagcagtacaatcatcgctcccagggcaacaatgccaagagcggatacctgctgcagaagattgtagattgattgtgcagacaggaaatttttattggcaatggttaaaataaccataagtaccaacatgagaaatacaggtgcgtacttctgtatattgtttttaaaaactggttttttctctttcaccaagatgacctcgcttccgtatttcctacagagaaagttctaccggttcccctgtctcaattgattttaacgcagcttcagcaatggcgacgcctcggatacagcactctgtatcaacagcatatggtttgccattcatggtagcatctgcgaaatgaacgatttcttctttcagaccgccctgaatctttccgtaatattccggccataacagagtatccggataagactccgcttcgtctgtcatgatctccaggccctgattgcggatatctaccataccaaagcccttggttcctgttacttctgcgattgaccagattcccatggcagagttgtccggataagcccagcagatatgtacatttcccacagccccattatcaaaattaacaataacaaatgcagcgtccagatcgccattcatatgtccgtttttcttattggaagcctgtgcgtataccttcacaggttttgcaggcatattgtaatccaccatcatctcaatatcatgaattccaagataatagaagaaggagactttgccctgcagacgattggcagtggaaacaggattgcctcgcttaaatgacatagcactgatctctcccaagtctcctctgcggatggattcttttaattccacataccggggatcgaacttgcagacctgagcaaccatcatgcgtaccttgttgtcatcagctgcttttttaattgccagacagccttccagtgttttagccagaggtttttcaatgataaaatctttttttgcatttgccacgtccacagcggtctgtacatggaaatcttccggtacacagatgtcaacggcatcaatatcctctttttccatcatctctttgtaatcggtataaacagcacaattatatttttccgcatattcatcagccagagctttattcagatccgcaatagcaactaattctgcattatccgcctcggcgataatcctggcgtgcaaaccaccgataaaccctaaaccaatcactgccatcttgcatttcttcatacttttttacctccattttgtcctacagtttttaacattcattccttactgatattataaacgggagcttttccctatttataagcgagtatcatttccacttccacaggtgcattgtccggcagtgatcccacaccgatagcagcccgtgcatgcttccctttttcaccgaacacagcttccagaaactcagaggttccattaatcactttcggctgctgtccaaaaccaggaacagcattcacataaccattgaccttaacaatcctttccaccctgtccaggtcaccaatgacatatttaacctgagccaaaagccgcagtgcgcagattttagcagcatcgtaagcttcctctacagaaacctccgctccaactcttcccacatacttttgctttccgtctacgatagccgtctgccctgacacaaacaacaatccatcttttgtctccacagccggtgcatatgctcctgccggagcgggacactccggaatctcatatcccatctctttaatcttttcttctactttacccatataacactctcctaacgatttatccggactcctgctctcactaattgttagaatagtcaatcttttaacaatgtcattcacttctattatcctataaaattttcaccgccaaattatcagactattgttcaggttaagaaagcgagtcacttggactcgcttttgtggtccgtatgtaaatcttaatattttttagattaagctcattataattatgattaatatgtttgtcaacaactttttaaggattaaagtaattttttacatatttttatgttcattttttggtttttaactacgttttgtatattttttattattttacaccctattttttgtgcataattttatttataataaatctattaatataattaattttaatatttcaatcaataaagccttaataacagcggtctttatttggaattatagtatttttttatgataatctaaattttttttatatatcaaaaggaaaatattgcaaaatgtattaaaaccatatatactcagattgtatatttatatatattctgcttttggctccggccaaaatgaaacaataggagggtactgtgttttatgaaaacaattgaagaagcgctcccattattaaagcggattatgaagttgattagtttgactctcggtgaggaatgtgaagtggtgctgcacgactggtccaaaggctatgaacaatctatcatagctattgaaaacggacatgtgacgaatcgtgaaatcggcgactgcggcagcaatctgggtctggaagtcatgcggggcaccatcaaggatggggaccgctttaactatgtaaccaaaactagcttaggcaagacactaaaatcctcaactacgtatctgtgtaatgatgagggagaacctttaggtgcactatgcatcaacatcgatattacaaattttatgaatttccgaaagtcctttgaagcacttgtaggaactgaggttatgaatcaggcagaagttccctttgacaacattgaatttcatgcccaggatgtcagccagctcactgattatctcatagctcaaggcttagaattagtaaacaagccggtcagccagatgaccaaagacgacaaattaactatcattaaatacctggatgaaaaaggtacctttttaatcaccaaatcaggggataaggtatgccagtttttaaatatttcgaagtttactttgtacaactatctggatacaatacggggagataaagaagataaaaagagtgaaaaagcataaaaaatgaaagacataaggagtcagttttgcagtactaaatgctgcaaaattgactccttatgtcttctgtgataaactactaccgaaccaaaaatttctcacagaaggagaaaacaaccatatgaagcaccctcagaaaatactgttcactgacttggacggtacacttttagacgataataagaagatcactccggagaattctgcggccattgctggtgccctcaaaaaagggcataaaatcgttgtctccacaggacgccctctggcaggcgcccttccggtgatccaatcccttggcctggaacaaaagggatgttatgccatcacctataacggcggcctaatctatgactgccatcaaaaagaaaccctctataagaaaacgctctcccgctcgtatgtagaatatatttttcgtgaagccgggaaaagaggcctccactgtcagacatattcctccggccatgtgctgtctaaagcctttacgcccgagctgaaagattatgtatcacacacgctggttcctacaaaaatcgtccctgagctgccccaaaatttggaagaggagcctgtaaaaattctggtaattgaacttgcaaacacggaaaaactacttacataccgaaaggaaatctctgagtgggccgagggaaaaatatccgtctttttttccagtccgtattatctggaacatgtagcggagggaatttccaaaggtactgcagtccgctttttgtgcaattatctgcagattcccctagcacataccattgctgtgggagacgcagaaaatgatattcctatgcttgctgctgccggtctgggtgcagctatgtgcaacggtacagaagaagtaaaaaaacatgcgggttatatcaccacagccgacaataaccacagcggtgtggcagaaataattacaaaattcatgggatgccccttttctttttaagaaaaagggattacaataggattattataaaatttttgtgagaaaggaagtctaatatggcaggaacaggaaaaaaactgttaggtcttgcagtagttggggctgctgtagctggaacaatcgcttatttcaaaaagcaaaaagaacagaatgaggatttagaaaaagattttgaggattttcaggacaacgttaaagaaactgcacactcagccaaagatgtggttgttaatttcaaagatattgtaacaaaggatgtagaggaaaaagtaaaaaaggcaaaggatactgctaaagatgtagccgaatttgcagaggataccgccgaggatctggcagatggtttctccgatatggtggatgaagccaaggaggctgccgaagaaatgttcgaagatgagggggccccggaggacagcagctcagacgccggggatgcagtgaccgccgaaactacagaggcagacaagactccgttataaatgcaggaagcacccgcaaaaacagcaggtgcttcttcttattactccatctccaatttacttaagatgtatcttttgtattctaagaactccggcgtcagattaaaatcttcccttctgggcttcttttcccggatgacaatttcctccgtaatcctccccgggctccctgtaagcagatagatgcgatcagacaagagtatcgcttcgtctatatcatgggtgataaaaatagtagacagccgaatctgctccataacatccagataccatttatggatcgaacctttcgtcagcgtgtccagggcgctaaagggctcatccagaagggcagctccctttgaatacagataagtcctaagaagggcagctctctggcgcatcccgccggaaagctgatggggatactttttctgtgtcccttcaagtccgaactcccggaaatacggctgcaccgtttctctggcatctctctttttatctccgttgattaccaggggaagggatacattatcctcaatggtgcggaagggcagaagcaaatccttttgcagcatataagcaatacttcccggacttccggtgatatctgtcccgttcagcgtcactttcccctcttccggaggggtcagacccgatataatattaaacaaagttgtcttgcctacaccgctcactcccaggagacacaccagttcattttccccaaggctgatggaaacatcctctattatcttttttccgtcaaaatattttgtcacatgagatacttctagttttgccatggcagcctccgcgcctattccggaagatattcattggagaagcccgcattttccggaagttctgactctaccagctgattttcgttcagccactggtagaacgcattccatctggcaggatcgatatatccccactgctctacttcccctttgtatttatccgttagatattcctgacttgcctgaaccagctcagtgtccagttcaggagatgccttgcaaaggatctcagctgcccccttgggatcttccaccgcgtcctcatatccctttttcaccgcgcgcaggaatgctttggcagtatccggatccttcttgaggaattcattgttggctattaaaaccggggtatagtagtcaaataccggattcaggtcagcaaacgcaaagtaatctgtttccagccctgccacttctgtggcaacccctgcccaggcgtaaaagatccagatggcatccacagactttgactgcagtgccgagacttcatccgtcacagtactcggaatcagctcaaccttgctgaaatctcctccgtccccttctattacatttttcagcattgccttttccaccggcatatcccaggttgcatatttttttccttccatccctttgggcgtatccattccttctcccgcccgggagacgatcccggaagtattatgctgaattagggcagccacggccgtaatgggaagggaattctccccagctaccgccggagccatactgtcctggaaggatacgccgaactgcgcctttcctgaggccaccaatgcctccgcaccgtcctccgggggctgtgcgatctccaccttaagaccttcctcctcaaaatatcccttttcctgtgctacatacaccccggtatggttggtattaggtgtccagtccagaacaaagctcacttctttcagttctttgcttccctccccgccggttccttctgtacttttctttgttccgcaggccgctgcagaacaaaccatagctgtgcagagcacagctgcaataattctctttctcattttttactttttctcctcccaaggcatgcactttttctgcagcacgttaatcccccacataagcagcaggctcaacgccgatatcagaaatataacagcaaacattttatcaaaagcaaatgccttccgtacttttgtcatgtatacgcccagcccgccaaagcctcccagccactcggcgatcaccgctcccaccacagaatacgtggccgaaatcctgaagcttgcaaaaaactggccggccgcccccggcacttttacatacctaaaaatctgacccctggtagcccccatagagcgcatgaggttcatcatatccttgtcggttgagcgaaatccgtccagcagccctacagttacagggaaaaaggttacgatgacaatcaatatgaccttcggtgtcatctcatatccaaaccaaagcaccagaagaggcgccaaggcaaccgtaggcactgtctgagtaaccaccacaataggataaagcgcctgatacagacgttcaaagcagtccatggccacagccatcaaaaagccaatggccactcccagaaaaagacccgcaaatgcctccagcagagtaatcctgcaattttccagcaagagagggaaatcttctataaaggcttttaccacatccccaggggaaggcagcatatacgaagggacaagcccggccgcagatgctgcctgccagataaccagaagtatgcctatggcagccagggacggcagcttacttgtgatgttttgtgactttcttttcaatggtaagcacatctccttcaggtttaaaagtaaccttaatataggccgccacagatggtgcgcctgcacggatagcaatgtgctggcattcttttacaatatccatcagttcgtcgtaatctccttcaatagccgtctcaaaaggccctacatagcagttcagtcctgtgcttttaatataagcaataacctcatctacaatacggattaattcctcatcgttttttgcctccggcaatgtctggattgctacacttgcattcatatgtctctcctccttattcataacataaaataaccctgccggatacaccggcaggggcgaatatcaaaaaaggtaagctgctgtgagcatcttcctgcttattcatccctacgctggcactacccagatcaggtcaaagggttaaaaacagatacggttttaatctcagccggactcttccggctcccctgttgttatacattagtctacttcattttacagcttctgtcaagaccaggcacgtttcagccgtttcatagcgctgacaatctcattttccgtcattactccatatcccataagcacagtagcccggggcttcttcacaggctccttcagataatacctggaaagtccgtatactctcacactctcctcctttgcccggcggatggcttcttcctccgtcataccatttttaaaatgcagaaggagatgcacacccgcattttcccctgaccacgtacatacagaatccatatcatgaagctctctcaggagaagatcgtgcttacttttataaagtgcccgcattcgattgagatgacgctcgtaatagccttcgttcaggaagcgttcaatgattttttgatcaacctttgacaccgtaacagaaaacggtttcccctgtttttcatactgcgccatcagttccttaggcagaaccatatagctgattcgtatggcaggggcaatggagcgggagaacgttcctagataaatcacccggtcgttctgatcaaacccctgaagcgccggaatcggctttcccttatagcggaattcactgtcgtagtcatcctcgatgatataccttttttcttttgccgcccagctcagcagctgcattctccgcttcatgggcataactgtacccataggaaactgatgggaaggcataacataggcaatatcggcattagattcctccagttccgggatccgaattcccatctcatccatctcaacggacgccagcggataattcagcctgagaaacgcctgataagctgaggtataagtaggattctccatggctacggtgtaccctgtccctaaaatcgtgcttaaaagcatcaagaggtaatcattgcctgcccccacaataatctgatccggctggcagttaacgcctctggcgtaatacagatagcttgtaatcgcctccctgagacttctctccccgttggcatctcccagaaggaacaattccgggtcttcctcctgaagaacacttttggacagctttttccaggcgttatagggaaagccgccgggtgtaattccgctgagtgtaaaatcataatcgtataccgggtggccgtctgccttctttttttccagaggaatcagggccggacggatatgataaagctcctcaatgtcacacacataataccctttgcaaggcacggcctcaatatacccctctgatacaagctgctcatacgccaggtccacggtacttctgcttaccataaggtgtctgcagagcgcacgggaagaaggcagacgttcgcctgccttcattctccctccctgtatttctctttttatatgaagatagatctgttcatacagaggaatatttgatttgctgtcaagtgcaataattaattcgttcatatcctgttcttcggcctacttcggcagtttaaaggagctcttcagggatacaatccggttaaataccagggcatccggcctggaatccttggcgtccacacagaaataaccgttgcgcacaaactgaaaactgtcgtatggctttgcatcctggaagctcggctcaacatagcattccttaatgacggttaatgaattaggattcagattcagtgacccgtcttcattgtaaacccctttttcttcatcgataatgttctcatagaggcggcactctgcctttactgcctgtggtgcaggcacccagtgaatagttccctttactttccttcccgtgaagccggatccgcattttgtctcaggatcataggtacagtgtacttcgattactttgccgttctcatccttgacaaaactctggcaggtgacaaaatacgcatgcatcagacgcacttcatttcctggaaaaagacggaaatactttctgggaggttcttccataaagtcttccctctcaatatacagttctctcccaaagggaaccttccggtatcccaattcctcattctccaggttattggctacatccagatattccacttcaccttcgggataattatcaataataagtttaattggatccagcactgccatcattctgggacgtttcatcttaaggtcctctctgatgcagtattccagcatagcatagtcaacggaactgtttgccttagaaaccccgcagagttcaacaaacattcggattgattccggcgtaaaccctcttcttctgagcgccgcaatggataccagacggggatcgtcccatccgtctacaacgccgtcctctaccagcttcttaatataacgctttcccgtgaccacatttgtcagatataattttgcaaattcaatctgcttcggcggtttctcatatcccaattcccgcactacccagtcatacaagggcctgtgatcttcaaattccagggtacagatagagtgagtaactccctcaatagcatcctcaatgggatgggcaaaatcatacataggataaatacaccaggtatctcccgtacggtgatggttcatatgggctacccggtaaataaccggatccctcatattaatatttggtgacgacatatcgatcttagcgcgaagcaccttttctccgtccttaaactcgccgttcttcatcttctcaaagagctcgaggttctcctccacactccttacccggcagggactatccgttcctgcctcagtcagtgttcctctgtaatcccggatctctcccggagacaggtcgcatacgtatgcttttccctttttaatcagctttacagcggcctcatacatttgttcaaaataatcagatgcaaaataaagccggtcctcccaatcggctcccagccactgtatatcttccttgatagactctacaaattctactttttcctttgtggggtttgtgtcatcgaagcgcatattaaacttaccattatacttcctggcaagtccgtaattcagaagaattgattttgcatgtccaatatgcaggtatccattaggttccggcggaaaacgggtacagacgctgtcgtatacgccttcttccagatctttgtcaataatctgttcaataaaattcttggaaactgtttctttttccattaaaacttcctcctcgtgttacaggttatattccataatatcatagaatcttttaatttcaaaggttttttgataaaatggaactgctgatactgtttttttacatacagtttctccatgtctataagaaaccatacccaagggcctgccataccggctatccctgggttatcatgcaaaggagtacaattcaaatgacaaaaaaaattctagtgttgattcctgtgaaagacaagcacaaactgcagctggaagagactgcccccaacgggattttcacatacgcctcacccctgacagtcacagaaaagatggccgcggagtctcacatcatcatcggtaatgtcccgccgaaactcctccgcgccagcgagaagctggagctcctccagttaaactcttccggcgcagacgcctatataaaagaagggcttctcgccccggggacaatgcttgccagcgccaccggagcatacggaaaggcggtttctgagcatatgctggccatgcttttgagcctccagaagaaacttcatctgtaccgggatgcccaaaaccggaaggaatgggcagatgagggtgaggttgtctcaatcactgattcccgtattttggttctgggcctgggagatatcggacgcagcttcgctgcccttactaaggctcttggcgcttacgtcattggtatgaaacgccgccccggcactgctccctcctgtgtccatgagcttcttcccaccgaagaactgaagcaagttcttcccaccgtggatgcagttgtcagttttctgcccaatacccctgagacgaaacatctctttgacagaacacttttgtctctcatgaagccttccgccatccttctgaacggagggcggggaaactctgtggatcccgacgctctgtatgatgccctgtcctcaggcgctctgtacgccgcagggctggatgtcacagatccggagccacttcccccagggcacagactctggtctcttcctaacgtgtatatcacgccccatgtagcgggaaaatatcacttgccggagactctggaccgtatagtagagattgcctgcagcaacctgtccagccatttagaaggaaaaccactgaaaaaccttattgacctcactaccggttactgtaagtaacaacttttatgcattaaaaaactttgtttgtaattcttcaaaaacctattgacaagcctctgggtttttgatagaattacaaacgttgacagcgacaaaaacagtcaatatgctgccttggctcagtcggtagagcgtcgccttggtaaggcggaggtcggcggttcaagtccgctaggcagcttttttggaaggtctgaagcccttgattttcgcggggttttgggcttttttagttatcaagtttaactttcgctgcacccggttgttgtttacatataatcatctattcttgttttgagctcatcataaggaatatcatattcatattcaatatcttctgcattatttgaaaatgttcccgatgttatatcctggcttaactctatgtaatacctttttcgtctgcgcctcatgttttgtgctgccacacgcgcaagtcgaggtaatacatataaaaagtgagaaaaatataatacatttacaccttgttctcataacatcttttcttgacattcactgcattccctatcatgaatggaaattataccgccgcactttaagcaggtatatttctctttctgcctttccataaacatttccaaaccacagtttcgaacaaattcactattttccattaggcttgcctgataccttttgttatagcttttttctagatttcttatgggtgtacaaggatactcggggcattcaaagcagtagctcaagcctttggagttaatacaatcttttatcttacatttacggcagtgttccggctttcccgtattgctgttcagacagccggcacagggttttttatgataacaatgcttataacataccttacaattcattccgcagggcgcaaacattatcgaatctatattttcttttggcattttcatagtttacatagaatataacaaaacacaggccattataacagttatcgtatcactgacataattaatcatgtctgccagctgtttgttttgtggattatttttcatttcttttagtttggctttcaattcgctgctttcatgtttagaaaaatattgatttaagtttttcgtctccttcagaatatagattagtgctatatcatgagaagtaatttctccgcccgttgtaattgctgactttatcgttcctatgagttcatccttatagtttttttcaggaatatatgtcgttttagggccgaacaacccccccgtccctttcgccgctttgccctcctcttccagagattcccctatctgggccgtgagctgtttgattctgctgcctgtgtaataatcactcatcaatttatctatggaacggggcttttcatttagatacgcgtacagtgatgcaaggtgtacaagttctccggggttctctttgattacggaaatcttattctttttagctgttataacattctttaataaaaaatccataaaacctgccgccacaagacccgcatatgattcctctttgtgcattggcggcatattcccattctcatcaaccgttaaagtataatattcctgtgcaatcgattttctgtccatatatcgtccctccaagttttctatttaattctatttctaataattatagcatggatatacctccaagacattacttttctgattttctccaaaggcacatggttggttttatggaggtacaagcttcttttcacagccaaaaaaagcaccctggggaaacagggtgctcaaacttggaaaatagcgagtggagtatctctactatctttgtcaagtatacttcattctacaagctgtgtcaatgcaatttttatcttatgttttctgttctttttgttccggcaacattttcctctccggttcatattccctaacgccaaggaatatcattaagtaacttctttttccgaggcctttatgcaaactatttccagtaatacccttgaggatactatgtattataaaaatatccctgtcctgatttaccgcattcaatatccctcttttacgtccacatgtagtttctcctctgcgcagagcataaacagatattacgcttctgccgccagggaacaagaggagtactgcagaacagttctctattctcaggctgtggataacgcacagtacctgccggtcaatcagccgccatttaacagctatcagtttttttcagattaccaggttacatttaattcctgctgcatcaccagcctctatctggaacagtacacatatctgggcggcgctcacggaaccaccctgcgtatctcccacacgtggaatttcttcaccggagggcagctgcagttaaaagacttttatccggcctctttttccatacctgaagatcttctggattctgtggaacggcaggcagcagaacgcctggcgctcagcccggcctcctattttgacgactacggggaactcatccggaaaaacttccggccggaaaacttttatctcaggccggcaggagcagtagtctattatcagcagtatgacatcgccccttacgcagcaggaatccctgagtttctgatcccgtttgcaggcacagagcaaaaaatgggataaaactttctctggcaatcccacagtagaaaatgctataatcagcctatagcacacagccttttaaccggcagagaaaggagtttttatgaaagagtacgagttattatgcgaatattatgacacctgttccctcaaacccaccaccagtctgaaagagatcgaaactgacgatctggatgaatatatgcgtcagtttattccgcaaaatgccacatgcacctgtaccaccactcctgagggagatattgtatatgatattatgcatgctggcatacgcaaacgatatcaattcacagagctatagagaccgattgctgttatttttcttttcctgtgagataaggtactctacgcccttgacaacctcccctctcggcttttagtatatgtctcttccagaggggaaagagggcggaatcttacctcctcctctatttcttttttatcaattcaatatataatttaatctgttctatctgggaatccagaaaacgaatctcctcctcagcctttttgtatttctgcatcaaagatgcactgtacagacttttttccatccgtttatcgtagatctggtccatagcctgtgtaagcctcagcacggtttccagctggcccgtctcccctctggcttcatactcttttacaatgtccagccaggaatcaatatcttcttcctgcttcccctgctctttttgccctagataatcctccagttttctttctgtaatcagcccatcctgtatgaactgctgaggagggatctcatatccctgcctgttatatgatttcatagcctgaatctttccgtctctgatcttccgcctgatcgtctcctcattctgtgcgagaagttctgctatatctttcactgataaattcttcatttcgcttccttcttttccttaagtcttccatgtaaaatccccacagccagttcttgcagtctctccgtccctctcttggggaacaagaccttcctaagattttcataaaaatacttcggcggggccccttttctttcagcctgttactctgttctttcaccctccatacggcttttcaattcctcaagctttaattctgcccctttcatcccgtccagtccggccatctcataccagtacattgcctttttcaggtctttctctatgccaagaccattctcatataagtaccccatattatacctggcacagggctcccccagttttgccgctgcctgattgaacgcaaatgccttttcataatccggacaatcggcctgaaattctttggctgccagtctaagcaacagcctgcctgatgtttttctattcataacattcaccctgcctcttctttagtgtagtgtagtattaatattataattatatactacaatcattgaatgaaaatgtcaacaaaaacagcctcttacaacggcagctgcaaaaactgcggttgtaagaggctctcttatctatatattagtttttctctgttcctgtcctggtctgtctcagcctccaggggcccagaagcaataccggtatcataacaacaggtattttcagtgctgcaagaaaccggtaccctcctcctacgatatttctcagacccagaacagaaattccgtacgcaatcagaaggaacataaaagcccaaaggatacgcctttggcgatggctgaatctcttcatgctttttcccattctgactccttccagtctggttactatactaaaaatcaatcctactcctgtactaatcattgcacagaaaagtgtaatctgatacattatggacaaaaacggaacttcagcgtttttcagtatagacaggatgggaaggttctcgtgactgcttcccggaaaatatgccaacagcaagatgcttaccagtcccagcatcagggcattcatcagcgcccctcccacagaaatcttaatagagtctctctttgatgcaatgcccagactggaggctgccagtaccccgataaaggtgcactggacaccagcatattttagtgaatccagtattgctcctccgatacttccctggatctcccagttccccacaaccttagagagatttccccagccctttgcaattccatataccgagatgcacgtaaggcatattacgataggtatggtaagcaaggtagagatatttctgaaaaactctacgcccagggaagtacagattaggataatgcctgcaataatagccaatgcaatcagataaggcactccaaacacctctgacagaagttctcctcctcctgcaagaaccgcccccgtaattaaggctgttccgattactgagattagatcccagatgattccgaatatactgccaaaaggtgcataaaatttatatgcaaattctttgtaattatgtgtattgctgcgtctgcagaattccactgcaatatacgccataactcccaatatccccatggaaaggaatggtgtaaccaagccaattgccccaaactttgtaaaatactctgctgcctgtactccggtggcaaatcccgacccgcagtgggttgcaaaccaaccggtaacacagccaatccatataggtaaactttttttttcgctcattggctatatggccccctattctgaatccgttacctatcaccataggcaacgatcaacgcatctatagctatagcccccataccttcctcgtatacaaatacaggattcagatccatctctgcaatggtatttttatgctccagcgcgtactgtgaaacctttaccataatgtctgtcaaagctttcaagtcacagggacggcttcccctgtatccttccagcattttgtatgccttaagctgcctgagcatctccagggcttcataagtatttaccggacagggacaaagtgccacatctttaaatatctccacaaagatcccaccaagtcctgccagtaatacaggtccgaactgcggatcatttgttactccaataatcatctcaagaccaggagatgccatttcctggatgataatcccgtccagtcttgcatccggcatatacctgcggcagtttgccaaaatagaatcaaaggcctccattgcctcctcactgcttttgacattcagccttacgcctcctgcgtctgttttatgcagaatatccggagaattcaccttcattgccaccgggaacttcattctcccgaccaccttgggtacgtcttcccgaacggcggctataccctgcgctggaatggggatccccagtctttggatctccagtttgctgtcccattctgtcatggcacttttttctccggacggcgctttgtccggcgccgatattgccagggtggatttctcccattgaaattctacaaactctcccagtttgcccagagccttgtaggccgtctccgcactgctcatcaccgggatcccatgggactctaatttttgcctccatgccttatctctgtcaccctcataggaaggtactgcaaacaaggccggtgcgctctccatctctgagatctgaatcatagcttccatactggttatctctttttgaggcacccccccgggccctgctacattcattcctaccagtacgcctccaacttccggatcttctcccatagcctttatcacattataaactttttcccgatccgtgaaaagggatgtggtcccatccaaaggatttttggctgctgcgaagggagggatatagtttcttatctcttttagtgtactctcttccaagtctggaagttttacatggtatttttcacacagatctgcacatatggtattctctcccccagagaaattaataccggcaaatccattcaccttgggcagccgcccattcagcacactgtacatctgggctgtacacaaaagttcctccagactgtctaccgttacaaccccgtactttttgaaaactgcccggtaagtccccgcacttcctgccagattgccggtgtgggatgcagcgctttttgcccctttctcagatacacctgacttcaatacaatcaccggttttctttttttcgctgccttttctagggccctgcaaaacgtagacgcatccttaattccttccagataaagagcacatactttaacattgtcgttgtctaccagatattccagacactcatccagggtaaagcagttgccgttgcctgttgacaccgcatatgaaatattaaactgttccagctgtacaatattagcggcaatgaatccgctctgggcgatgatcccaatcccggtcggcctggtattcagatcaatcaaagctcccagtccccacatcattattttatttacattgtttataattcccagacagttagggcctaccactttcatatcataggtccgggcaatgtcttccatttccttctccatggcaatcccttccggggtatgatcctcggagaatccgctggcgtataccactgccccttttactccaagctcccctgcctctctgagaatggaattgactgtggatgccggggtacagatcagtatgcagtcaacaacctcaggcagttctttcaagtctttataacatttctttcccatacagctctcccgcctgggatgaacaaaatatactctgtcccgaatatggctttttaaggcattggcgccgctcctctgaccaaaggagccttccttgtccgttacgccgatcactgccatggaccggggattcattaagcgttcaatatctgtcattgcgccctccttcttatgaaactgcctggtacccgtattctattgctttcacatttttgtcgttatatttacctttacctttgttttcaaaaaacctgcacatggcagctgtggcataatccaaatcaaacagaccgcattttttaatcactgctcccgccatgacaagattctgccccttcatgttttctgcctcctgggccagatggacacagtcaacaggaatgactgttatcccttcaggatagctgtaatcctgacgcacggcattggagttgacaaatacagtggcatccggtttgcagaattgcaggtaatccagagaaggttcattcatggcaattagaatgtccgcgtcctccatgatggggctcccaaccttttcctgttctgtttctccaaattttaccacgcagtttgcctttccgcctctcatggtcggtccgtaagcaggcatccatacagcattcagttccttctgggcagccatataagcaatgatcagaccgccggtaagtacaccctggcctccaaatccggcaaaaataatttctttcattccattacacccctctcttcttaaattcaccaatgggatattctttcagcatattctcttccagccattccagtgatttcagcggagtcatattccagtttgtaggacaaggtgccagaacctctatcagggaatagccttctccttttacctgggcctctagaccattctttatcatctttttcagctgcctgatattttttgcatcatttaccgcacctctcgcaacataagccacatgagtaaactgactggctatcatttccggcagatggaaggggtatcccttcagctcacagtcacgccccagaggcgtcgtggtggttatctgatccgacagagtcgtccagctcatctgtcctcccgtcataccaaaattagaattatttaccgtaaatactgtgattttctcatttctgtatgctgcgttcagcgtctcggcgattccgataactccggcatctccgtcaccttgatatgtaaaaatcaaggtatcctttttcgtatgcttcataccggtagccacagccgccgctctgccgtgagcacactggaacttatcaccggcggtaagagtgttcagattgcaggagcatcccactcccagaaccgtaatatggttgtctttataccccagctcctctaccgcttcctgaatgagcctgtatgcaatgccatgaccacaccccgcacaaaactgattacttttatatattatctcaggcgcctgctttattacattcatctagaacacctcctttatggaaccatttttaacttccatatatttttccattaccatctttactccaggggttcccatactgtgggcataacagtaaacgggcactctcttatcggaggttaccctggaggcaagtgccacatcctccaccatctgtcccagatcgttggattcaatgctgataaaccctttaacctgagggtttacttctttaaatgcctgtaccggataaggccataccagccggggacggatcaggccggctttctctcctctggctctcagtacatctacagcatctctgcagaccctggcaggcagtccgaaagcagccaatacatactctgcatcctctacctggtaattttcatatctctgcatctcactctgaatcaaagcagttcgctccctcagtctggcgaccagggtatccgtatccggggactgccgcgtacctacttttccgctgccgtcaatcccccaacccaaaggtttctctctttttttatagggaggtatttcaactgactccatcatctgacccagaaagccctctgagagaactacaactccgcacctgtatttttctgacacatcccaggcctcatagatatcgtctaccagctcctgaatcgtactgggagaataaacaatatggtgatagtccccatgtcctccccctttcgtctcacgcatataatctgactggccgctgtccagccttccaagtcccacgccccatctctgcacattcagacagacatagggaagttcacttctcgccgcataggaaaacgcttctgccttcaggctgatccccggtcctgaggatgcagtcatagctctggcaccgcaggcggcagcccctataaccatgttcatagaagcaatctcattttctccctgaatcatctcccggttttcctggggcatgcgcagcgcaagatgttccagaacctccgtagagggggtaatgggatatcccgcaaagaaatccattcctgcccgtatggctgcctctgcagcagcaacatttcccttcattaattcttttgccataattgattctccctcctattcctctgcaatggtgtatacataatccggacagaccgtatagcatattccgcagcccacgcacgcctctgaatccagcacaacaacctcataccctgccttgttcagcacgcttcccctggaaattgcattctgtgggcatgcctttacacaatactgacaggatttacaccattccccattcatgattgcttttttactcaatgatatccctcctctcatttaaaattggttatcatagttattctctataatttttaccaaatccgttattaacctgttatatggtgtaggcacctgatacttctcaccgtaccggactacggcaccattgagaaaatctatctctgtttttttcttacggtacatatcctgtgctgttgagggaaggtggttatacatgggactttccggagagattcctttctgtcctccttttttcaccggctcgggtggtacttgaatccccatagccgcagcaacgctgcgcacttcatctgccaccttgtctgcaatatcgcttccttcttcggctgcatgataagggccgagaggaagtctcacgattccgcagaccggattaccggaacaattctttgtcattttataccacaataaaggggcaatatccgcttccagagaaaattggaaaccggctttcacaaaatattcagcgaattctttcatctccggagtaatcttccgattggccgcaccgatcatcacccgggaggtagggctgataagagcactcacatgcccgggctccaccatcttcccaccgaattcaatcagaccactcatgattttgtctcccccaaacacttctgacaaaatctctacgttccccatcccgttctgcactgtaaggattacggtacgctcatacgccagacattttgctcccagagcagcccctttggtgtacaggccttttaccaggaaaatcatggcatccattttttcccccagctgatcggcagatgtatatgccttgattttggccgtatactctgttccgttcacttcataaatcagccctttttcattgatggcatccacatgctcctgaaatgggtctacaaagtaaatctccgcacccgtcctggacaggtgtcctcccacggtgctccccatggcacccgctccgataattgcaatcttcatgaaacaacctcctttatcttataattttttttgaagctcattgtactcagcaatctcttttcgcatctcgctcagtttattctggtccagtttaaaaaacaggaaaataatcaaagctatcacacaggctgcagccggcaaatatgtaactacatacatcaggttggaagctaaggcaggattcgccacggtctctgctccctgatatccggcctgcaccagtccccagttcaatatgcttacaccgattacctgagaaatggtgattgccatgaaataaaatgacattgcagtgccttgggcaacggtctctgttcctccctttttaatgtttttccacactgcatagtcaatcgcagccgcaaacagcacgatatcgtatacccctttcagtgagtagaaaaactgggcaatagtcataagaatgttaaatccccaaagactgctgcctgtgactgccaatcccaggtgcgcacctgtaattgcaatgagaataataatataaagtttcttaatatccttaatcacatattttagtatgaacggtgccagaaaggttgccacaattgccactatctgggttgccgctttataccatgccatcaaagtcacatctcctattacatacttgaaaaaataaggtgccatgggagctgcaacaaaatatcttacaatagcaaaagagcaggttagaaatacaatcagcagaggtttattggaaacaatctgccggaacatggctgatacattagcgcctcccttttttccctgacgctttatcgcttttaccgtttcttttagttcccctgccgttgcatttttatactcaaaagctacggtaaggtacaaaattatagtaatactgcagaaaatcaacaatgtaaagaaaaacccctgtgcatcttctgcttttcccgttgcagaaagctttacaatcaggagaggaccggctacccccaccaagaaccggcagacttctttgaacagattgctggaggttgagactacggatacttcattttcattttttgccagagtgggtattgcgcctttataaccgttgaacagcagtgtgttaaagatatatgccgatacaaaaaagagtaccgtgacaggcgtaggcagctttgcccatgctgagcctgccattgccataaaaaaagcggtaagagcaaagggcatgtaacgtatccagggcagaaatttatctttgcttttgaaaggattactgtcgataattattcccgtaaccggtgagaaaaagactttaaaaatattcatagccgagataatagtccctgtcattacaggattcatattagctatgttcgtcaaaaaaaagttctggaaatctttaaagaaatcatacataaactgataggcgccttccccaattccgaacgtaatcagcgcccgctttcttcttttttcctgattcatcccatatacctccttctttcttgaacgcgttcaattttcagtattattaaacgcgttcaatcacgcgtctcaaaaatgtcctgtatcagcacagaacatttatcgatatacaattttatatcccggttccaggtgtatgccgcattctttataatgctgcagagtaatgtccaccagctcatccagcctgcctttatcctcaaaaaactgaaggctgtaactgttgagaaaaaatcttacaatatctctcttcgtaacattatgcttttctctgtccacattgaccagttttggtttctgggctggtattgttatactgaacagatatcggtaccccgcatcaatatttacatttctcaggatgtgagctgacatttcatacatatactgtgccatctcctcggtataacaaatcccattgtataagtctagcaggggctgactttccatcagcagcatagcatcaaatataattacgtgggaagcctctaaatcataatcctctccggccggaaaacgtctttttatgatttctaaaagctcttttctgaaactggaataaatcttagcacacagcccgtctttggatccaaaataatagttggcaagtcctacacttatctcagcttctttggcaattttacggattgtagtgtttttgtagccgaattcataaaagagattacgggctactgcttctatcttatcgcaggtctctttctccaggtttgacactaccttctcctttcttgaacacgttcaatatacttacattataccaatgttattctaaaatacaattgacatttcaaacaatattccgcatcaaatttcagtactattttacccagaaaacagcaccgaaatttgatgtctctcttacaataattccataacctctttcactttcccgcgtatcctctgaatggcattatcaatggattttccgggttttcctaaaatctccccaatcttcagatagccatacccttccaggtaaaggtcaagcactttattttcaaagggactcaatcttttccggattctttcctgcatgcctaccgcgctttccttagcaattacaatcgactccggatcctgctgccacagattttctgattccagcgcaggctccccctcctcgttgctcagggaaatataggtattcaagggcctgtgcttctgccggttggacagttgtatggcattataaatctgccggtctatgcacagactggcaaatgtggcaaacgacgcatttttgtccggaagataatccctgacggctttgaaaaggccgatcatcccttcctgtatcaggtcatccgtctcaccgcccatgagaaacatagcatgggcttttttccgcaccaggctcttatatttatctatcagataatcctctatctcctgattaccctcccggagcagggtaatcagctcttcatctgtacattcctcataacccttcattctatcctccccgtattctcgatccctagtatgctgctttatccctggagcctctgccgcagaatctcataggccagcacaccggcggccacggaagcgttcagagagtcaatatctcctctcatagggatggaggctgtaaaatcgcaggtctcccttaccagacggcttaccccctctccctcattcccgatgacaagtcccaaggggcctttcagattcacctcatacatggtgctccctcccatgtctgcacacacaaaccaaagcccttctttttttaggtcttctatggtatgcaccatattggtaacctttgccaccggcgtatagttcagagcacccgctgatgttctggcaacggtcgcagtcaggcccaccgcccgccgctttggtatcacaaccccgtgggcccccacgagattggcggtacggataatggctcccagattatggggatcctcgatgttatccaggaaaaagataaacggaggctcctcctttttctgtgcaagtgccaggatatcctctatttctgcatactgataggcagccgtcaccgcaatcacaccctggtgcttccctgtctccgacatctgatccagccgttcttttttaacaaagctgataatggtgtccttttttttagcttctctcaaaattgagcgcaccggaccgtcctggcagccgtccaggacaaaaagcttgtccaccgcacggccggaacggaaagcctccagcacggcgttgcgcccttctactttattttcctggaatctgctttcctccataatactctcccttttctaatcctatttttatcaaatccagcatacgcttccactgttcggtgaggtacaggtaacccattaacgcctcaaatccagtggctctgcggtagtctgacatggttgcgttcttagccatggttacagacttggcatttctgcctcttttgtatacagccgcttcttcttccgtgagcagttccataagatgttccatcatagaagactgggcagaagccttcaccatcgtgctggctcttttatgcagcttattcacctgggaattcccctgttctaccagaatggttcggataatcagatcatagatagcatccccgatgtatgccagcgtcagcggggaataggtgcggatatccgtattccccaggtgaaactgctcctttaaatactttaagctctcttccattttaccccttctctggtatcctccaaaacaattcccatgcccagaagctgatctctgatttcatcggcacgggcaaaattctttgcctttcttgccgcctggcgttcttctattaaagcttcaatatctgaatccagcatctcttcttctttctctacaataagtcccagcacgtcgcaaagcttcagaatggtttctttcacttttcccagaaatgccagtgtgctttcccccccgcagcaggtatttgcaaattttacaagttcaaaaactgcggagacagcatctgctgtgttaaaatcgtcgtccatggcctcttcaaactttgccgtgtaggaagtaagctcatttactttctcctgctcagccagagacatcacatccccctgggcagacttcataagataattcaggctgtccacagctgtgatgattctgtccagaccgtttttggaagcctccatcaattcctggctgaaattcagcggacttctgtaatgggcgctgagcataaagaaacgaagcacctggagatcatatttttccccgatctctctgacggtaaagaaatttcccagagattttgacattttcctgttgtcaatattgagaaaggcattgtgcagccagtattttgcgaatggtttgccgttgcagcactcgctctgggcgatctcattttcatggtgcgggaaaatcaaatcctctcctccggcgtgaatgtcgatctcttctcccagatattttttagacatctcagaacactcaatgtgccagcctggccgtccttctccccagggagactgccatgcaggctctccttcctttttcggcttccagaggacaaagtccaggggatcttccttttgatcctccccggacacctggatggcccggaatccggactgaagatcttctatgtttttatgggagagcttgccgtactccttaaattgttttacccggaaatataccgttccctttacttcataggcaaagcctttttctatcaatgaggagatcatggcaatcataccaccgatttcctgggtagccagcgggtgagtagtggcaggttttacattcatgtctgccatattctttttacattccttaatatagcgtgtggagatctcctccgggcttaccccttcttcccgggcctttgcgataatcttatcatccacatccgtgaagttagagacataatttacctcataccctttatactccatataccgtctggcagtatcgaagacaatcatgggtctggcattgcctatatggataaaattatatacggttggtccgcatacatacatctttaccttcccatcctcaagaggaataaattcttcttttctttttgttaacgtattatagactttcataagcttctcctttatcttctacttctttttccgtctgcctgcagtttttctcacagtgccgcagctctctctccatttccaggatccggcttctcagccggttattctcatcctgcagaatcttgatatcctcccagacaggatccggaagatgaacatgatccatatcgttcctgggaattctgacattatccctttttacaatgtgccccggcacaccaaccacggtgcagtttggcggcacctcgctgagtaccacagaacccgccccgatcttagagttttcccctacggtaaaggatcctataagctttgcccctgcgctgaccattacattgtcctccagcgtgggatggcgcttgccggtctcttttccggttccacccagagtaaccccctggtagagcgtaacattatctccgataattgaggtctcaccaatgataaccccgcttccatgatctataaaaagaccttttcctatggttgccccggggtggatttctatccctgttttatgggcagctctctgagaaatccatctggccagaaaataatggcctttctgatacaatttatgtgctcttctgtattttaacataactttaaagcttgggtacagcagcacctcccagggtgtctttatcgccgggtcccgttctgtgattactttaaactcttctctaaaatgctggataaaccccatggtatcaccctttctttctaaaatcaatatttctgcaaaaagaaaaagccccgtctcttacacaagagacgaagctggtccgcggttccactctactagaggatacaccgtatcctccccttctttcatttaacgcatgagtaacgtaccggactactggcggcagatgcctgcttcgcccggtcagctccagggggcacttcgctggattctcccttgagatggctttcagccggtgaccttctctctctgtcagttcaaatatcagctactcttccctttcgttgccttttcctgtcttcttctagtttattcagaaatgcagattttgtcaattgttttcttttttggatgttccttgtagcctgccccgggttttgttataatactctcatatgctttactattacctatcaaaggagattttgccatgaaaataattgatgcccacattcactgctgttcctctccctattttaaccaaattgccgaaggggcagcccatgtaaacacaacggagcatttgcgcacagtttttcaggaggaggggattgtccacggcatcgttatgggcaaccagacactggatctttcgtatcatcaataccctgagtttctcagttactgtatcggtctggacagcaactgtctgaacgccagaagcctgaccgcctccatagataaagtagaacagcaccttcagcgaaaaaattgtgtgggtattaagctgtatcccgggtataattctcaatatgtctttgacactgcctactttccctactatgagctcgccaagacttatgacaaaccggtagccatccacacaggagatacggcaggaaccggaggtctcttaaaatacagccacccgctcaccattgatgaggtagctgtggcatttccccaggtaacctttgtcatgtgccatctgggcaatccctggatcgttgacggcatagcagtggtagataaaaatgacaatgttgccgcagatctctccggactttttgaaggtatggtagatcctcaaaaaatacagaaaaaaagcaaaggatacctggagcacctgcggacctggctgggatacctggatcaatatgataagctcctgtacggcacagactggccccttgtgaatattcctaactatatagcttttataaaaagcattatccctgaggcatactacgaggatgtattctataagaatgcactgagaatataccgccctgcaaatatctgttaaaaaggaatccggccagccggattccttttttacttcaaattaagtttggcaaatgcatcagcgaatgcattgttgatgggctccttggcctcttttttctgttcctgcagatatctctgtacatccttcttgctgactccggctccttccttttctcttctggccttgaaggaggagagcttttccttatagccgcaggaacagatgaaagtctcttccttgcccttcatatataattccatctttttgtggcagttcggacatctggcattgcttattttggatacggtctctctgtgcccgcactctctgtcctgacagacaagcatcctgctgttctttccattgacagccagcattctctttccgcacacagggcatttggtgtttgtgaggttgtcgtggcggaacgtcccgtctccctgtcggatctctccgatgatatcctgcgtatagtctctgatattggccaggaatacttcttttttcatagacccttttgcgattctggaaagcttcatctcccagtcggctgtcagctccggcttttttaaatcctccgggaccagttccagaagctgctttgcctttgaagtaataaaaatgtcttttcctcttttttccatcagaaaactattgaaaagtttttctataatatcggctctggtagcaactgttcccagccctccggtctccccaagggtttttactgcggcggcatcccgggattccatatattttaccggattttccatagcagacaataacgtggcttcattaaacggagccggaggctttgtctttcccttcgtcaattccagattctgcacggggtacttctctccctttttcacctcagggagcatctgttctttcagagaatttcccctgctgtcattttcttcctcttcctcatcgtccatggacacagtttcatacacagccttccagccttcttcttttactatctttcccctggcaagaaaattctccccctctacagttgccttcattgttgtctgttcatagacaaagggaggataaagaaccgccagaaatctccgcactaccaaatcgtatattttcctctcctcgttggtcatatgatccatctgcacaaactgctcggtggggataatagcatggtgatcgctcacttttttatcatccacaaaagatttatttgtctgaatgggtttcatgatcagacttccggcaagctttttgtaagggcctacactgcaggctttcagcctttcttttatggtccctaccacatctgttccgatatagcgggagtctgtcctggggtatgtgaggactttatgattctcatacaggcgctgcataatattcagagtttcctttgctgaaaatccaaactttttgttggcgtctctctgaagctccgtcaggtcatatagaccgggagacagtgtcttcttggcggcccgctctatggaattcaccgaaagagttcctctcttcagctgttctgccattttttccattcgttctttctgaaaggaacggtagctcccggacttctggtcctgccaggtccactttatcttgccggcctgaaggctgatgccgtagtattcttccggtttaaagttccgtatctcttcttctctttttgctatcatagcaagggtgggtgtctgcacacggccgcaggagagctgggcattgtacttgcatgtgagggcccttgtggcattgatacctaccagccagtcagcttctgccctggatactgcagctgcatagaggttattgtattctcttccgtcttttaaatgtgcaaatccctcccggatggctttatccgtcaccgatgaaatccagagccgcttgatcggcttatggcagcccgccttctccagaatccatctggcaaccagttctccctcccggcctgcatctgtggcaatgataatctcattcacatcttttctgtaaagctgggtctttactgcctgatactgcttggatgtctgcttaatcacaaccaactccatctttttgggcatcatgggaagatactccatcttccactctttatattttttgtcatatccttccgggtccgccagtgtgaccaggtgccccagtgcccaggtcacaatatattggctgccctccatagccccctggatatttttctggcattttaaaaccctggcaatatccctggctactgagggcttctctgctatcactaatgctttcatttattcctccaaaataacttctgtatatgttgatctaagatacatcttttccaagtataccattaaattctttttgttccaaccgtttttgcatttctcctgtttctcatagcctcctgtcccttttcatggtataatttcagtatcaaatacgaacaggaggcggtgtaccgtgaaagaactctttgcatgtgccgatcagtatgtacaggaatctgactggaaggatctggctttgattaagttctgcctttgttcccttggtgtcatgattggcctggccataccaaaagagcgcaagaaattgcctctgcttctggccgcagcagtttttatggttacctacattcctctgatggtgaagctcattaaaatcatcatccagcggcgggaacaggcataacctacccatctacccatccacacgccggggccaaaagggggcgcctgcctttcatgcaggcgtcatccggctctggcagaaatggtaaaaggtcatatactcttcttccaggatactgcccttcaggtatacaaaattgaactctctggttgcgccgtaattttcaatggcaatctctttcagccttccctcccggatctcatttctcaccaccatctcatagagaaaggttattcccaaccctctttccacaagatatttaatagcctgaaaatccccaatctcactgaccttccggatttgttccaatttcaggctgtattcacttaaaattgcttcaaagatgtccctggttccagaccccttctcccggataataaaaggatagtcaaggagttcgtcaatggacactttctcaccagaaagagggtgttcctttgcacacactgcaatatacctttcattcgaaaacagagaataggcataggcatcctttctgaattttccctcaataaccgcaaaatcgatttctcctctgtccagcttttttaacaggctttcggtattttccaccagcatagacaccttgtccccgggaaattcctccagataatcccccaggatcctgggcatcacatactctcctatacttaaggttgccccaaatttaagctgacggcagggtttctcagcctgctccagaagtttgtagatcttcctgctgtttgattccatggtgagagcataccagtaaaaaatcctgccctccccggtaagggtaagggtgcgggcattcctgtcaaaaaactctgcctggtattccttttccagatagtggatgtgctgcgtgactgccggctgtgtaatatgcagcgccctggcagccttcgtatagcttttccgcctgcacacttccagaaatgtatgaattctaaaatctaacatggccttctccataaatatattttatctatcaataattatttataattttatcttatagtaaaatagtggtagaatcaagttaattaaagaatttataataaaggagtgttttaattgaaaaagaaaatgagcagcattttagaaatcattccgggctttattccctgcctgctgatcgccctggcagcagagtatctaagctccttcgtccccgcactgggtgcagcgctgattgccatagccataggaatcatctgcggcaatacctttctgaacaaagatacgctgaataagggaaccaagttctcggaatccagacttctggagtattctattatactgaccggactgacgcttcatctgtcggatatcgcaggagtccgtctccgggggatcctttttattgccattcaactttccgtcactatattcggcacctacctcatcggcaagcgcctgggcttcggcaaaaaattctgcctgcttatgtccgcaggaaacgcagtctgcggttcatccgccatcggcactgtctctccgattctgaaggcagattccaaggataaggggatttctatcactattgttaatgttaccggaacctttttaatggtattgcttcccctcatagcaggaatcttataccaccatgagaccatccatacctccgggctcatcggcggggttctgcagtctatcggccaggtaattgcctcagccaagtttgtgaacgacgatgttgtacagatgtctactatttttaagattatccgcattattttcctggttctggtagcccttactttttccaggatgaacaccagtgaggaggatcccctgtttgcaaaagctgcatgcagcagtgaaaatgccggaaaaaaaaccagggtatcctgcaaagttccctggtttatcatcggattctttttatttaccattatcaacagtaccggagtggttcctctgcccatctcccataccgctaaatttataagcagccagtttgagatcatagccctggcagccatcggcatgcgggtcaaattccgggatctgctgcgggaaggaccaaaagcaatgctttatggaggctgcgtaggccttatgcagacagtactggcggtaacccttatcggcgttttattctgataacccggccagcgatatcagggtgctgccttccaggcggtaccctgtccagtcgctcatctgtctcgctcccagtgacacataaaaatcaatacttggctgattccagtccaggcaggaccactccagtcttccgcatcccctctccacggctatctgcgccaaagagcgcagcagagtctttcctacccttcttccccggtattcaggcaaaacaaacaagtcttcaagataaatcccggctctccccaaaaaggtggaaaaattgtgaaaaaacagcgcaaaccccaccggcttttcctcacactcggccagcagcacttctgcttttttcttctcgaaaatccactctctcagcagctcctctgtagccactacctgatccagcatctcttcgtagacagcaagcgcctgaataaacccaaggatctgggggatatcctcttcatgtgcgaaccgcactgcaattttatctgtattttccattctttgatctccttatcattcgtataattttccatacaaacatgactaaaaagagtccggcaagccaaacccgcccgccggagcactacccattagggccgtcttcctttgtaatataaaaggccttgtaaacaatctgtctacaaggctttccgtagcgagaaagggatttgaacccccgacactgcgggtatgaaccgcatgctctagccaactgagctatctcgccaaataaatgttatctgtatttaaacagatgaatgggacctatagggctcgaacctatgaccctctgcttgtaaggcagatgctctcccagctgagctaagatcccatatctttgtgctttgcaggtcttttgcgtaacctgctctgctattatataatttatcactacatttgtcaacctgtttttttactttttttatataatttcgatgtttttcaactgcttgcagaagggcctcctctccggatatgtgcctctcttccggctcccataccgcactgcctacaataaggtatactccagcatctcataggcaagcctgctgccctcatctgtctttggagggagcagggctctggccacacactttggctcttcctccagtccgtccagtcttttaaggtatgcgtaatcaccgtccagacgttctaccagataatcaattctctcaaacataatttctcctttgcttcacacggattctccgcttgtatataacagacattcttctatgttccatttcactttaatatacctcagcggaaattgcaagtgagagatgcatctctaatgttactaattggacaatccaggtctgccggaagaaaaaacagatgccagaacggcaggatttgaacggaccttgttgacccatacaagaattgcaatttgtatatatttactatagctgtaaagaaagcccttggaaagcaacaaattgaaactgtacaatatagattacattttgggaactataactaaaattttaaatttttattaatgtttttgtaaccttaatttaatactttttatccccccggctttcaatcaggaatgcattttttatgattgattcactgtctcccctatttaccgcctttttgtccgtttttatgtacattttatactttttatgacaaaaagcaggtttttccaccgacatccggcagaaaaacctgtcttttattctttatttaaagtaagcgacgccggattcaaaaatttgaatatcctgttctccgtaaatattgatcgctacaccgtcatccctgcgctctgagtgggccattttgcccagaacccgtccgtcgggacttgtaattccttcgatggcagcataagagccgtttacattccactcttcgtccatggagatgccgccgttcagatcacagtactgggtggcaacctggccatttgcaaaaagcttgtctatccattcctgacctgcaacgaatctgccctctccatgggatgccggattggtatacacttttcccagctcagccttctgcagccatggagatttgtttgtcactactttggtatataccatctttgaaatatgacggccaatagtattatacgtcaatgtaggagaatcctctgtctgccctgtaatctttccgtagggaacaagacccagcttaatcagagcctggaatccattgcagattcccagcgcaaggccgtctctttcgttcagaaggcgcataaccgcctccctgattttttcattctgaaatacagtggcaaaaaatttggcggaaccgtccggctcgtctcctgcggagaaacctccagggaacataatgatttgggcctgattgatggctttctcaaagatcctcacagaatcccggatgtcctctgcgttcaggtttttgaatacctttgttacaacctgtgcccccgcacgctcaaacgcttttttgctgtcatattcacagtttgtacccgggaatacaggaataaacacagtaggcatagctgttttatgtctgcaaacgtagatttccttcgcatcatataaccggttttctatctctgcagtgtcttctgttgctttggatggaaacaccttttccagcgtacctgtccatgttctcagagcctcctccaccggaatctctacgttggcatagcggaatactccgtcatcctttacctcaccgatgagggtataagtgactccgagttcacctacttttccctcttttacttcacagataatgtcaccgaatcccggtgcaaacagatccctctgatctacactgtgctcaattttaactccaagcttgtttccaaaggccatcttgctgaccgccgcggcaatcccctggcgatccagtgcgtaggcggagagcactctgcccgcctggatgtcctcatgaagcttctgatactgttccatcagtccagtataatccggcaaatcatattcacccttcggcatccggacccaaatcagacggcttcccggtgtcttaagttccggcgtgataacatcctgctgctttgccacattcacggcaaaggataccagtgtaggaggaacatcaatctcgttaaaagtgccggacatactgtcctttcccccgatagagggaaggccaaagcccatctgtgcggcgtacgcccccaaaagtgctgcaaaaggctggctccaacggcttggatcctctgtcatccttctgaagtattcctgaaaggtgaatcgtatctttcggtaatctccgccggctgccacaatcctggcaacggactctaccactgcatatacagctccgtgataaggactccagctggacagatatgggtcaaaaccgtagctcatcattgttacggtattcgtcttgccgttctgtaccggaaccttagccaccatagcctgggtctctgtgagctgatactttccgccgtaaggcataaatacagagcctgccccgatggaaccgtcaaacatttccaccagacctttctgagagcaggtatttaaatctgccagtgtatgcagccacttttcttttacatcaccaatttcctccctgcggaatatagttccctctttaccgggaatgtctacataaacctctgtctcctggtgggctccattggtatccaggaaagctctggagatattcacgatctctttgtctctccatatcataactagtctgggggattccgttaccactgcaacttcaacagcctccaggttttcttccctggcatattccaggaactgctccacatccttcggatccactaccaccgccatccgctcctgggattcagatatggaaatctctgtaccgtccagtccggcatattttttaggtactttgtccagataaatctgaagtccgtctgccagctcaccgatagcaactgagacaccgccggctccaaagtcattgcactttttaatgatacagctgacttcctctctgcggaataaacgctggatcttacgctccgtaggtgcatttcctttctgcacctctgccccgcaggtctcaatagactcctcggtgtgcaccttggaagatcctgtggctccaccgcagccgtcacgcccggttcttccgcctaaaagtataatgatatctcccggatcggagttctcacgaatgacagcacgtctcggagcagcccccaaaacagcaccgatctccattctcttagctacataatccgggtgataaatttcctttacatacccggtagccagaccgatctggtttccgtaggagctgtagcccttcgcagccccccgcaccagttttttctggggaagctttcctttcagtgtatccttcacagaaacagtaggatccgccgctcccgtcacacgcatggcctgatacacataggtacgacctgacagcggatcacggatagcgccgcccaaacaggtagcagctccaccgaagggttctatctctgttgggtgattgtgagtttcatttttaaagttaatcagccactcttcttcttttccgtccacatccacaggtactacaatgctgcaggcgttaatctcatcggattcctcctgatcctgaagttttccctcagcttttaatttgcgcattgccatcagggccagatccatcaggcagacaaacttgtcctctctgcccttaaaaatctcttctcgatctgccagatatttcttgtaggtggatacgataggctctttatactccccttccccgaaggtaacctttttaagctctgtggaaaacgttgtatggcggcagtggtcggaccagtaagtatccagcacacgaatctctgtcatggaagggtctctcttttccacttccctgaaatagttctggatatgctgaaagtctttgaaagtcatagccagattcaaggaggcatacagctctttcagattgtcctcttccatctccgcaaatccgtcaaagataataacatcagaaggttcttcaaactttgtcaccagtgtctcgggttttgtgagatctgtttcccttgagtctaccgggttaatacagtgattcttaattgcctggaattcttcctctgtaatatctccctctatcacataggtggtagctgagtgaatgataggttcttcatcttcctttaagaacttcacgcactgaaccgctgagtcggctctctgatcaaactgtcccggaagatattctacggagaatatcctggccttttcctccattccgaatgtttcctgaaacagcacgtctaccggcggttcagagaaaactgtcctgcaggctgcctgaaaaatctcatcggagagattctccacatcataccggatcagcactctcactcctgtaacagtcttaattcccaggtagctgccgatctcgtgcttcagttcctttgcctgcacggcgaaatctggtttcttctccacataaactcgtcttacgttactcatcaacgactcctttcctgcctttttaaggatggcaaatccatgattgcattcttatagtttttatattatcataagaaatatcattagtaaaattaatatatcttatatgatttataagttgtgttctatacacaggaaggagtttacccatggatatcagctatgaactgtacaaagtgttttattttgttgccgctaccctcagcttctccgaggcctcaaaaaaactttatatctctcagtcagccgtcagccagtccattaagacgctggaaaaaaagctgggccagcccctgtttatacgcagcacaaaaaaagtgctcctgaccccggaaggagaaattctattccgccatatagagcctgcggtcaatctgatccacaaaggagaagaacagctgatggatcccaatcagttcggagggcagctgcgcataggcgccagtgatactatatgccgttattttctggttccttatctgagccggtttcacaaagagtatcctgagatccatattaaggttatgaatcagacctccatcggatgtgcagatctcctggaaagcggtcaggtagatattattgtcagcaacttccccaatatccgtctgaaaggttacggtacattgcggatgatcaaagagtttcaggatgtatttgtggcaaatgaagcctattttagcttccggggagaatccctctccttctctcagcttcagcgtctgcctctgcttatgctggaccgcaaaagcacaaccagcgagttcctccacaatcttttttcccgtcataatctgaatctcgtcccagaggtagagctcagcagcaatgatttgctcattgacttagcccgcatcggcctcggcatcgcatttgtccctgattatgcactggattcctatgacaatctataccgcctgaagctggaagaaactcttccccaccgctttcttgcccttgcctccaatgaacagattcctccttccgctgctgttcaaaaatttattcagtatttcgatccggcagagaactagaaaaaagaagccctctgcagattatatccctgcagagggcttctctccaaactcatattccttaaacgttagcgattacctctacttcgcaaagaacattcttgggaagcgttttcaccgctacacaggagcgggcgggcttgccaacaaaatatttcgcatatacctcattaaatgccgcaaaatcacccatgtcagcaataaaacaggtagtcttaactactttttcaaagctggtgcctgctgcttctaaaacagcccccaaattcttcattacctgctcagcctgttcctcaatagtatcccctttaatctctcccgttgccggatcaatggggatctgaccagatgtaaataagatgtcgtttaaaaccattgcctgagaatatggtccgattgctgccggtgctttgtctgtgctaattactttcattttgttatctcctctccgattgctcccggcttctgctggattttcaacgccgggaatactttgacgctccgtcaatatattcattatagactggaaccctggtgatggtcaagaaaagtttttgtatattgaccaaaatttttgtatttcttgttttactcccgacagtccgcatgctttgtacccctcccactccggcggaaagagctgacggtactctgactgaagaaaccgttcgtccagaagcagtacaatccctctgtcttcaacggtacgaattacccgtcctgcagactgaagaactttgttcatgcctggataacggtaggcatagtcaaagccgttgattccccgtttgtcataaaactgctttaggatttccctttcattgcttacctgggggagccctgtgcccacaatcacagcgcctatgagtcgctccccgtacaagtcaatcccttcggcaaatacgcctcccataacacaaaacccaaccaatgtacctgtattgccgggggaaaattcctccaaaaaatcctccctctccttttcattcatagccgtatcctgaagaatgcacctgcaggactcatgagcaaactcctcccgataaatatcatatacatcctccatcatccggtatgagggaaagaacaccatatagtttccttctcttccactgaccagacaggatatatatgctgctatcttccggtattcctcatacccacgccgggtataccggctgcttacatcccgtcccagcaatagacaaaggcgctccctctcaaagggggatttggcatacatggcatagtcatcctcccgggtgctgaacaagctcctgtagtatgccaggggaagaagagttgcagaaaagaaaacagcgctgcttcctttgttcagacagttttgaagattcgccgcaggattgacacagaaaagattcacagagaatctttcctgctgccgttcgcagtagatcacatagttctcgtccagcagatcatacatattcagaaagtgtctcacctgaaaagacaattccagaacagcacggctgatttcttctttatgagcctcctccagaaaattttccatctcccccagcagattcataagactgatggaaaaggtcccaagattgggcagcacttcgtaggtttcgcattcctttttatattccaggagctctttgctgcatcttcccagaagcctctccagctttttgccctgtcctttcacaattctctttacttccagaaaatcttctttatacaggcaggcgctgtacatcttacgtcccctctctaccagattgtgggcctcatcgatcagaaaaagatagtctcccttcatcccctctccaaaaaaacgccggagatgtacattgggatcgaatacgtaattataatcgcaaattatcccgtccacccaggaggcagtatccagacacatttcataagggcaaacctgccatctttctgcatgttcctccagcacttcccggctgtagggcttatcctcccccaaaagcgcaaacaccgcatcatttactctgtcaaaatgaccgtccgcataagggcagtgctccggattgcagttcatttcttcgcagaggcagagcttttcttttgcggtaatggtaattgtcttataggataatccatgagccttcaaaatggcaaaagcctcttctgccacagtccttgttatggttttagctgtaagataaaaaatcttgtctccatacccctcacccacagcacgcaccgcaggaaaaatagctgacatagttttccccacccctgtgggagcctgaataaacagctgccgcttatggtgtatggtgcggtacacacccgccaccagttccctttgtccttctctgtaaggaaagggaaattccaggtgctccatagactctctgcgtatttttttgcgcctgtactgaaagtccgcccatttataatattgctccaaaagctcctcaaaccactccgtcagctctctcagagagatcttctcctgaaaacgtttgatattttcagattccagatggcagtacgtcatctgaatggtgacagcctccagacgcttctggcttccgtaaatatacccataacacatggcctgggcgcgatggacttccacaggtgcagtcagaagagagaggtcaagataaacccccttgatctcgtcaatcagcacctcatgttcctcttcgcagattccgtcggcccttccctccaactttatgataaattccttatattccttttcataggttaacgggacctccgggcggtaggatgccttcatctgcttttgtatcttccggtgcagacggcttcccttctgcatggcctcgcggtctgttccgcttcccactctgttgtccagactgccgctgcgaagtataaactcaaccagatttcggacggataattttataattgtcttttcttccatatcatctatagcgcaaacaggcgcaagacaatccattgtcctgcgcctgttcttctcctgtcttttatgctactgcatatttattcaagaaattcaaaaacttttcgtcacgtccaaagcactttacggtcaatacgcgagtcaaatccatgctgaatacacccaaaattgattttgcatcaattaccacgcggttgtaaaaaacatcaatatcaaaatcgcacctgctggcttctgtcacaaattcttttacatcctcagtggctggtaacttaatctgacgttctatcatagttatcaccctttcatacaaataacacatataaattttttcttctgtattattgcacttgttccagaatttgtcaaccgaaaggtatgacgactgacatcccctgcatttcggacttttatgaaatttttctttaaatactggatcctcccagttttttttcaccaatttttacagcagtccatctggggagttatggattgttaatttattaacaccttttacctaatttatccagtaatattttgtcatattttacgcagtatttattcttctaaagcttttggtagatacgtgtaggcatctttcaggtaggtattatcgatctgtccgaaggtccctgcatcagccgcctccgcaaaagaagtatcgatgggcatctttcccaccagaggcacattcagctctgctgccacctcttcgatatggctgtccccaaatatcttaaattcttttccgcagtccggacatttcacatagctgtagttctccacaacaccgaataccggcacatgcatcatgtctgccatattgtaagccttctttacgatcatgtgcaccagctcctggggagaagtaacaatgaatacaccttcaataggaagtgactggaaaactgtgagggggacatccccggttcccggcggcatatcaataaacagataatccagttcgccccagataacatctgtccagaactgtttaaccatattcgagattaccggtcctctccagattacaggcgcatcttccttgggaagcagcaggttcactgacataattttaatatcgttttctgtaatcatagggtagattccctgatcatctgcctgtgccgcacctttcaggccatacattttaggaatggacggacctgttatatccgcatccataattcctaccctgtagccctttgctgccatctgattggccagggaagcagtcacaaatgactttcctacccctccttttccgctgacaactccgattacctttttaatttcagagtatccattggccatttcctttgaaatccctgttcctttttctttgcttttacatccttcacaactctcttttgtacatgttgtgctgctgcagtctctgctcatgactttttactctccttttctttccttatgtttattatacggccttatttcataaaccggtcgatcgctttgttcaattcttccagggcttcatgatccccgctttccaccgcatctacgatgcaatgctcaatatgatcctgaagaatcacttttcctgtattattgatcgctgctttgactgcggaaagctgtatcagcacctcgctgcagtctctgccgtcctccaccatacgccgtatggattccagatgtccgattgctctggaaagtcggttcagcactgccttggtatgctcatggctgtgcgtatggccgccggatccgtgtgagtgagctcccccatgggtatgctctaccactgttccatcttccataatgtgagtatgtgtatgcttctgctcttccatacgtcctccttagatttctgtaaaagtatacctctgtttgatcttggaggtcataatgtcatatactatgctcccgtcctccagtacacttttttcataaacgaagtgttcttctccctgaaatttctcttctatatattgatccagattctcaaccgcgatttcttcaaaaaaaacgtcccgcatctgattgccggaacacagattaaaaatctcccatacagcttcatattccttcaaggttccgttctcctttactttctcctgtggcactgctgcccatagcttatatattatatcacacttttcctttttctcgatctacttttattatattttagtatttttttaggaaaggaattgccagctgtcaaattatgtcgtatcatagatgtaatctattctgggaggaaataaagatatgcagcttttaaaagaacgtattctgaaagatggaacggtaaaaccgggaaatattcttaaggtagacagctttctgaaccatcaaatggatatcccctttatcaatgaactgggcaaggaattcaaaagacgtttttctgatgttcccattactaaaattcttacgatagaggcttccggcattgggattgcctgtatcgcagctcaatattttaatgttccggttgtatttgccaaaaaggcccagagcctgaatctggacggagatatgtatactactaaggtagaatcatatacccacaaaaaggtgtatgatgtcattctctccaaaaagtttctcagcgccgaggatcatgttttgattatcgatgattttctggccaacggctgtgcccttctcggactgattgagattgtccaaagcgccggtgctaccctggaaggggccggaattgtgatcgaaaaaggctttcaggacggcggccagcagatccgtgacatgggaatccgtctggaatccctggctattatagaatccatgtcagatacctctctgacgttccgttagcgcttatttcacattgttatgatacccccggcggtatatgaaaaaacttctgtttttttgtataccgcttttttcgttgctgcaggcagatgttctgcacaatcccgcctaatctggcatgtttatttttaataaaactggctattttaatcagtccaattattcggtatagtatttaaataagtaagaaacagaaagggagtatttttatgaagataaataccaagagaattgtgatgaccgcacttttcgccgcacttgcctgtgttgccaccatgtctatccgcatccccactcctggaaccaacgggtatatacaccccggagatgccattgtaatcctctccggaattatccttggcccggtatacggagcgctggctgccggtctcggctctgcaatgtctgatcttttgggcggatattttatctatgttcctattactttcattatcaaggccttaattgccatgcttagtggatatgcattcaaaaagatttcacacaaaggtaagcaccagtttgccggagtgatcgccggaggtgttattgatattattctggttgcaggaggatacggtttctgtgaagccctcctctacagccccgccggtgcgcttgccagccttccggccaacctgatccagggatgcggcggccttatcatagcggctatcctcttccctatcctttcagcagtccctgatgtgaaacggctgattgctctttctcattagatttctcacacacaacaaatgccaggcatttcacactgcctggcatttgtgttctcttattcttttatcatctgatagtaatcaaattcttgataccccagcctttgataaagctttatagcgccctgattctcagccgtggcctccagacggaacctctttgccccggaatactctttttccagccattgaaacacctttttcccatatccttttcctctggcctgatccgtaaaatacagctcctctacccagaccaccatccctccggcttcattgctccaggtaaacgccagaatacaatatccgcagagaccatcctctccttctatcacaagcattctggcataagtcttttcttccttcagacactccacaaaggttttttcaaaattctccctctccaagggatgcagacacgcccctgttcctgtatagaaattatttaccatcccccagacaatttccctgtcctggggctttatatctctgatattcatagtttgttcctccaagtctttctaattctgtatccttcgggcagatatacccggtactcgtatgtgggtcattatatcattttaaggtttattaatcaaattatagttttgtgtaattgttttgtgtatgtaaagttcgagataaaatagtcggcgagcggagtgtcgcagacggacggatatagaagggagcaccggggggacagggccaggccaggggccggggtatagggacaagtcagctcgaggctcccttcccctcagctaagtcctaccagctgctaaactcgtcaggaaagccttcctcgttaatcagctggtggactggatcttcggctcactccgcttaacctccctgacttgtccctataccccggcccctggcctggccctgtccccccggtgctcccttctatatcctggcagagactcacttcacattcacggaaaacgggtggggaaggtcgaacgttgtacacttctcctcttgtttcccactattgatgactcgatgttttggataaatagctccccctggaacttccccatacccaggtgagaggaattctgcggcggtgggctggctggttcgggcgggagggaggcttaagttccgcggacgattccgcaggagtgagtagagagtcttaggcaaaaccgggattcacgctggagattttttcggcagtcaaggccgaaaaaaagtgagcatgggcagagaatgcacatcaagcattctttgcacatacgaacggtgctccggcggggattccggttttgtcttagactctcttcgcgacggaggtgtccccggaacttaagcctccctcctgtccgaaccagccagcccgctgccgcgggatttctctcaccgtccccccgccacctcacactttccgacttgaatcactttaagctgaagtccaagcgctacagcactaaatcccaattattttcccaaccgataatactcctccgtcactctctccagctcctctctaaccaattctactctctcccctttcctgggtgcacttatcctggcagtcaattccatcattttcatatttagcagtgtcctttgcagctccacagaatcctctgccttttccatacgccttttagaggtctcatactccttccaattgccttcaaatgtccgtatctcacccttatcgaaaaacaggaaacgttcccctgtctcctgagccaggtgcctgtcatgggttacgatgagtaaagtacccttccattgttttagcagcaattccagagcctctgcagtatacatatcaatgtgattggtgggttcgtccagaattaaaaagttagcatccgaggccagcagctttgccagcattacttttgcccgttctcccccggaaagtacagacactggtttttctatatgcctggatgtcagatacagattagcaagaatagccctgattacagactccttttggttggacgtagaccggacattctgcagtacggttttttctggctccaaggtctcatggtcctgggcaaagtaccccagcctggcttgtggggagaagcgtacagcaggatcctgttctactatttttctgatcacagaagttttccccgtgccgtttggccccattatgaccgtacatttgttagctgatattttgaaatcagcatcttttatgatagtcgttttgccgtaagcaattttaatgtgctccgctgtgagagcattttttccctccatgggatactcagcccccattttcatagatattttgggcaaatcttttggcttttctttcttctccagcttatccagtcttttttctattgcctttcccctgttctgcacatgtctctgctgaatcgcagctgttcccttgtaaagaatccactcactgctgcccattcgtttgggcggccttctcatcccctccgcctcatgtttaatctgatgcatggctgattccagatgttttttctctgtctggaactgttcatactcaaacagggcatattcacgctctctgcttttctgttcagaccaagcggtaaagttcccaggaaaaacccgcagtttttcgtcctcaatctcccagatggtatcacatacctggtccagaaggtatcggtcatgggataccagtacaaacgcacctttaaaacccttcagcattttttccagagtttcaattccctgcacatccagattcgttgtgggttcatccgcaaataaaagctttgtctcccgggaaaatgctgccgcaatggccagccttgtcctttctcccccgctcttgcaggcagagcctttgaggttcatgcagcttaaaaggtaagcgcttgtatcgccctccgtctcctgctcctgagtaatataggaagtactgcaggatactttaatatctcctgcatcagcctctgtctgtccgctcagaattttaagaagtgtacttttcccgcatccattagcccctaccaggcctatcctgtcgtgttccccaatttctaatttatcaatagaaaataatttctgtattccgtatcctttttccagattatgtgcttctaataacaaaaaaaatccctcctaaacactctgtccagaaaggatttttgcatacaaatagaatgccggtatctaaaaatacccgcaaaaatacctgcaagaaaaatccggtgctgaacagagcaaaacaaataaaagggcatctacccttttcattttaaagtttcctgttgtttgctttttgttcagaccttacattctcattttcctgcagataccccgttctttcttatattgcttgtaatatagcataactgttccggactgtcaagggttctgcaaaaggcatgtgttatgaatctatgataatatcacctttagaatcatttgagattatgtccttttttaactataagagataaccgacgtatacgtcgaaagccgagcctggaacaaacggccatgcccgggagcatagccgctgataggaaaccgtattaactgttcaccttgctgtccattcgcaagtgcaggcgatggattgccagccttgcaatcggctgagcaatacacatttccacaaacagcgatatagcaaagttgcgcggccatttgaagaaaaacattcggataggttcccatgtgatagagcgcgttccaacccatgtacctattacagtcagcaaaattgacatcataaagactgtacacagaatattaacaacaatatgcgcttgaaagctatcccctttggatactatttttgcggtcagtttttccgcaggcacataggtcagcaacacaatcgcaatcacactcaaccagataaacggcaggacggtcagaacatcttgatacacatataggtggaacccggcttcaaagcaggtaatcagcggagcgataatgtttaccgagataatggagataatccccataaacaaagcgaactcctttttgttgcgtggtaacttcatgtaaaattccattgtccagactcctttcaagggaaaaaaataagcgtgaaatcatactgatttcacgctgaaccattatacgcgctctttgaacaagaaatattataccacacgctttctggaaatttcaagaacaaaatttcacacttctattacttctttattccatatgagcacaaaatgacggcacgaagacccagaaaaagcgaaaaagcagtaaagcctcattttcaaaagctattgacagagttatgcaaaaggcagaagacaatcccctgccttttgcggtctctaacttcctgtcacaaatttttccagcgccagggcaacccctgcatgacgattggatgcagtaacataatctgcagtctcctttatcacggtagccgcattttctacagcgacggtgaatgccggcagtgacatcatggttgcgtcattctcactatctccgaaaatcataacctgattgagagggatttctaaaaaggctgctaaccatcgaacagcatttcctttattcgctcttttgtttgtaatctccaaattgttatacagcgaagaagtgacagcaatatcccctctgcttccaagcagcattcttattccttctttcgccctgagatccgaaaaatacagattaatcttttcaatccctgttcccttgtttctcacatactctatcacatcacctacagcctgtcttgtttttctcatcattctgcaaatctccggttctattccataatcctccagatgggtcagaaatctgctttcagacttgccggtgccgtctacaaaaacgtcgtatataagggaatatggtgttacctcctctaacacatccactgccagcagagggcttaacagctctctctttatccacttgttttcctgcaaatcaataatctctgcgccgttggccagaatcgcatatcgcaccaaggaaatcagctctctgcattctttgagccctaaaagattcctacccgtaactggtatgatttcgatgttccgggttttgcatttttttaaggcttccagggttctgtcagaaattcttttcttctcatccagcagcgtatgatccagatctgtgataattgcttttatctccattgtcttgtccagtttccgggataagccttacggggtaagggtgattcgttttacatagtaatattccttcagagaataggaagaccagtccttccccactccgctttcctttatgccgccgtgggcgtagggcagaggggagccgccgccccacacattgacaataacctcaccagcctccagctgttcagccagttcgaacgcctggtgcatatcattggtgtatacgtaggcggaaagaccgtacctggtatcatttgccagggcaacggcatcttcgggggagtgatacgtaagtaccggaagaaccgggccaaaaatttcttcctgacatacccgcatgctgttatgtacctgtgtaagaagcgccggcatcatataattcccctccggtctgtcttccggaatattcccgccgcaccgaagtttggccccttgttttacagcttcctctacgagacgcatcaccctgttcctgtcctccggggtgatcagcggacccatagtcgccccatcttctctgccccatcccagtttgcatgcctcaaactttttctgcacaaggctgcagaattcctctgccacagattcgtgtacaatagcccggttcacactagtgcacacctgtccgcagttattcatcttcatagatgcaacaaaattagccgccttttccacatccgcatccgggagcaccactgccggagcattgccccccagttccagagaatacgtcttaatgctggtactggactcctgtatcatctttctgcctgtggcagaggatccaatcaaggtaatcagcctgggaacaggactctgattgagcactgctgccacttcctccgatggacctgccacaatgttaataactcctgcagggaactggatagaggccgcgatttcccccaccttcagcgcggaaagaggcgtaagagaggacggctttattatacaagtacatccggaagccagagctggtcccagctttgcccctacattgagaagcggcatattccacgcaagatgccccaccacaacacctatggggcggtattcgtggaggtggtaagtggcatgattagaattataatcgggaatactgatacctgtcagacgctttgcctcctcccagtagaaatccagggcgtcgattaaaatgtgataatctctggaagctgcgaacagaggttttcctgtctccatgcttaagatatctacaagttcctcttccttttttaaaagcgccgcttttaatttatggatccagtttcccctctctgtcagggataatgcagaccacgttaaaaacgccttctgcgcactttccagggcagaaagtgtctgttgcttatccgctgtttttagctggcagatctcttttccggtgccaggattgtagatacatttccccctgcctttcccttcttctaattctccgccgatatattggtaaaacttcataattcacttcctccttttcctattttgccagtcctgcttcctcaagaatgggtacgtaggtatccacctcttccttcagccacgctgtatattcgtctgcccccctccatatcatattggtattctgggaagtgacatattctttgtactcctcactgtctactgcattcctgaatgccttttccagtaccgcaatgacatccgatggggtaccctttggcgccacgaatccacgggttgaatacacctcacagtcccacccggattccctggctgtcgggacatccggatagctctcctgcctttccgctgtaagcgaggcaataaattctatatctccggaatccagctgggcgatacagtccacagggcaggataccgccacatcaatatccccatttgccagtgtcaggccaagtcctacgccgccccccgcattcggcactacattaacttcgattccagccacactgcagaacttcagaatagccatgtgccacatcccgccagcctgtccggttccccagctcagttctcccggatgagcctttgcatactctaccagttccggtaaatttgtaaacctttcctccccttttttgataaacagggaagctccgtcaaaattaacagaacagattgcctcgacatcctctctggaaagctctgagtatcccagggccttcagggtagccagattcgtcatattcatggcaatggtatatccgtctgcctcagaatctgccatctgctgcagtccgatagaagtagaaccgccttctacgtttgtacatacgaacggaacacctaaatccttttccataacagaggtcagtacacgggcaatcagatcgcttccggtacctacaccctgagggataatcacctcgatctttttgctgggatagtctgaactcccgtcttcactctttgcagcattgcctgatgttactttctgctgtgaatctttttctgcagatgcagctttttccccggaatcatttccgcatccggccataatcataactgctgccactgcaatacccaagatctgaaaaaatctttttatcattctgcttcctcctctttactcctttttgctttcctggtttttatcacttttctggttttggggacaacaaccatagccattgtcagcgcccagaatacacagggaatcggcctgaaaaatatagcataattcccctgggacatggtcaaagccgaacgaaaatttgtctctgcaagagctcccagtacctgaccgaggatcagtgcagaggtggatatccctactttgtccataaaaaatcccagaatgccgaaaataaccatgacataaatatcaaatactttattagaagacgcgtaggagccaattacacatgccataagaatcaaaggcattaaaatctttttgtctgtattaataagcttcgcaaaccagcgggccgccagcagtccaatgataatcatgaaaatattagctattattgtatatacatatacgctgtacacaacctccggcgtctcctggaaaatcatcggccccagacgtattccgtggatggcaaaagctcccagaataatggctgtaaccgcatcccccggaacccccagagcaagcatagggatcaatgcgccgcccacagtggcgttgttggcacactccggcgctgcaattccctcaggaatgcctgtcccgaatttttcaggatgtttggaattgctcttctcactgttataagccacaaatgcggctataggacctcctgctcccggaagagcgcctatgatagttcctataatagaacagcgcagcagcaccccttttaattttcccagtaccccccatcccgggaaaatcctgtctattttctgctgctgcttcttttcggagtcaatcgtaaacagctgattcataatctcagacacaccaaacaagccaataagtgcaggaaccatgccaataccgctcataagattctgtgtaccaaaagtaaatctgggaatccctgtaaggttgtccattccaattgtggtgataaatactccaatgatagctcccagaagccctttcagaagagaatctgcagacgcattcgcaatcacacagagtccgaacacagcaatcacaaaatattccggataggtaaactttgctgcaatcctggcaatggccgagcatcccacaatcagaaaaatacagctcacaataccgccgaagaaagatgataccgtagaaattccaattgcctttccgccctcgcctctgcaggacataggatatccgtccagagcagtcataaccgcagaagaggttcccggaattttcatcaaaatagcagatatggaccctccgtacactcctcctacaaagattcccagcagcattgctatggcactgcctgattccatcccaaaggtaaatgaagtcagtactgctacagccattgtggcagtcaatcctggtatagagcctaccgcgattcccagcactactcctaccagtaccagacatattgtcccaaaggacaaggtggaaagaaccgatgatatggtcgccagcatacacacaccttcctttctacaaaaactgcataggtacagagacccttaagaatctgacaaaaaccagatagacaaaggcaatggcggcagctggtataaaaaaaagccgtttccatttcttctccccacagataagcatagttgcatccagaaatatccaggtagaaatctcaaaccccaccggacggagggctataccatatgcaatcataagggccggaataaaaatcatccggaataatccccgcatattgctgccaatcttgccctttagttccgctactttgtacagttctctgtgaagataagacatttcttccgttccatattttcctgatatcacccgatatatttctgtacccataagtattacggccgtgacagtaaaaaaggccgcgcagcacagagggaaaaaactgggtccggcaactgcaagacctcccagcataggcatctggatgctttcataatagatgtaaacagaagcaatcagtaataaaacagaagtgattacatttccaatcaatgtatttcctccttccttttacatggagcaaataggcctcccagttcctggcagacctatcatacctttacccaataatcatttttgtctcgaccagagctttccggatacgctctacctcctcttccgttcttggaagaaatggctttttcgggataccaatatcaattcccagcataggaagaactgcatggtaaaagggaaccggaatgcccgaaccggtcactgacctgagaaggttagccttcagctgcatatctctggctttctggaattcaccagctttgcaggcatcatatatttctttgataaattcagggaaggcattagacagccctgataccacaccgtgtgctcctcccacaactgcaggtaccaggtgggtttgagagccgattaggaaaaggaacccttctttttttacttttgccatataatcatagaaaagagcaatgtctgccgaactgtcctttatcccctctaatccaatgtcggccaatgctgccagcagatctccgctgatacagaaattagagtatttggggttattataggcaataaccggcagatccactgcctggatcaagtctttgtagtattggacaatgacatcctctgtgtgcctgtaatagcagggggtgacagctgccacagcgtctgctcccactctctgggcatgttttgccagctcgatggtgctgttggtgtcggtgcatcctatcatcagaatcaccggcacgcttccttttgccacagacattaccgtttctgccactgtttttctctgttgaacggtcataattgggcctgatccataggaaccgcccacaaacagtccgtctaccttaccgcacagatattcggtataagctgtcaatttctttgtatcaacctcaccggtttcatcaaagggggtaatcactgccggatatactcccgtaaatctttttacatccataggaatctcctttccttttacgttttcctgctttctcttatcctgcctggttaacgattacagctttctctgccgcccataaatgcatccagctcttctctgctgggataggattctatatttcctttcagcgtgacgctaaacgcccccacagcatttgccaaagccaggcatgtttccatctcagcaccctccagtacgccgcagagatatcccgccgcaaatgcgtctcctgcgccgaaggtatccaccgcccgctctgcccggaaccccttggaatagcacttttctttgttctcatagccgatgcatccctgctctccaatttttaccaccacagtaccagccccatatgccttcatctgccttgcgatttcatccggctcctctgttccgtataaaagacgtccctcttcctggcccggaaatacaatatccgcatatttcaagagcctgttcgtcgtgcgtctggcctgttccagcggccacaccttcaggcgaagattgggatcaaaagaaaccagcagaccactctcttttgccgctgccatggcatattccgttgtctcctcagcttctttgctgagtccgggtgtaattccgctgatatggaggatttttccagactttagatagtttaggtctatgaggtctggagtcattgtactggctgcggaaccctttcgataataaaagtttctgctctccccgttttccagtctctgcctgaagaatatacctgtaggtgcattgtcatccatcaatacctgacatacctctactccttccccggcaaccgtattttttatctttgcgccaaattcatcatttcccaatttactaatccagcctgcgctgtgattaagtttcaccagggccactgcggtattcgtctccgctccgcctatgtgacattcatagtcctgggaataccgcagcttccctttgctcaggctgtcaaagactaccatggtctcacctaatgttattacctccggcatatttcttcctctctacctcaggccgttcatagcttttttggcaatccctacaaggtcttctaccctggaggttctgggattggaataaatattgccgctttgatatgccttctgcgcaatctcctccagatcttcttccttcactccccagtcttttaggccctgagtaataccaatgtctgcattcagcctcttgacagcctctaccgactttgcagctgcctccataggagacagcccctccacgtgttcccctaaaagcttagctacctctatatacttttctgtggctgcagggagattgtattccattacccaggggagcataattgcattcaccgtaccatgggggatcttatacttggcgcccaaaggcatggcaaaagcgtgagaaagtcccaatttgcccacattaaaagccagggccgcaataaggcttcccatcagcatatcctcccgggcgtctatgtcatctcctttggttgccgcctttcggagagctcctgcaatcaaacgcatagcgtgataggagagtccttctgatacgggctgtgtggccttagacacataggattccattgcatggcagaatgcatccatacctgtagctgcagtaacatgggaaggtacacttagggtcagctccggatccagaatcgccgtatccggcataatctcccagccgcccacactggcttttatgtctttttctttgtcccccaccacagcccagaaggtgacctcacttccggttccggcggtagtcggcaccgcaattatgggaaggggcttgttttttatgtttccgaagccaaggtaatcaaaaatttttccatcgtttgtccccataacagctacatttttagccgtatccatggagcttcctcctccgactccaatgaccgctgtagcctttgcctctttcagcatctctaccgcctcatctacccctttataggtaggttccggctccacatcatggtaaatactatattttatgtttccctcctgcaatgactcttcaattgttttcagcacaccgctggcatataccccccgatctgtcactattagaacactgtcgcttcccaggtcttttaccttttcagcggtgtgcaaagctgcaccccgtccaaaaaacagttctgtaggcattttatatgtatacaactgactcatacgttctcctttcatacaactttacataaccattcacccctgtacttctcatagttagctggtatcataaaaacgcagcatacaaccttctcctcctttcgtttatactctgttatagttcagtaagctttatcacaaaatgattatgatatttttttatcaatcagtaattaattcttttctttttgatttctaataggaaaactttttatactttttggtaaaattgtgcaattaattcaccttctttttgtattttttgcacctattgtataatttcagtttacacaaagcttgataatttgtccaatttctattataatatataagttataacaaaattgtgataatacactgtgcgatacataattcgcagacaggaggcgtcatgttttataaaaattatgagtattttcttacgatagccaaataccaaagcataacaaaggctgcagatgagctttatatttcccagcctgcccttagcaactatttaaaccgtcttgagaaaaaactgggaattgcactttttgatcactcttctattccgctgaagctgacctttgcgggagagcactatctggaatatataaattccctgaatcatatggagaaaagactggaagatgaattttccgagatacgaatggaaaagcgaggaaagatagcggttgggcttagtccctggagagcttcccatatgctcccaagagtgcttcccgatttcagcgagaactacccgcacatcaatatacaggcagaagaaggactggatcatgagctctataattttattgagtggaaaaaagtggatttcagtataaaaagccttatccatccctcccctcaatttcattatgagattataatgaaggaacgtattctgttggcgattaacatccgccaccccattctaaaacatatttcgttccaatacgattacgatcctaaaaacgtcccccattttgatttggaacgcgccagaaatgaacgttttatatttccaaagcccacccagaacctgtatcatgcaattcaggagatccttatcgtaaatcagatagacggaacaggctttgaaactgccaatgtggccactgctttgaatctggtagaagccaattttgggatcacttttgtgcccgaggcttgtattcttcattcgaatccctaccccaatattgtattttttacaattggtgaacctgtgcttttttggtacttaactgcagtatataagaaaaatgaatatcttcccaatatttgccgcctgctgatagaagattttaagaaaaattatcagactccccgtcaataaaccttctgcataatcatattctacgcagagtatatggttccctccggatagagctacccactgaaactttctatatccgggcgagaggaaacccgtgacggggactggcttctctggaacacaaaaaagacgcccctaaattactgggaacgccttcgttggattgatttaatgtaaatacaccgccactacaatatcttgttaattattttttgaaattctttttatattatttcttttctttttttgtgcactatcctgttctttttggactgtgttcaaatattttctggtagctgctgtcacctctccgcttaaaagagtgatcgcaatcaggttagggatcgccatgcatccgttcatagtatccgcaagctcccagataaatcccggagcagtaacacatcccggaaggatcaccactatgtagagaagcttgtaaaaacgtatgtatctttctcccagaagataagtcactgcctgcacgccaaaataagaccagcctacaatggtagcaaaggcgaacaacacgatagcagccgccataaacttgcttcctccgggaattgcggtctcaaaagccaaccccgtcaatgtcgtcccgtctatgttttcaattccatttacaatgttagaaagacactgggttttgtcatacactccggatgtaagtattaccaatgctgtaatcgtacagacaacaacggtgtccgcaaacacctcaaagattccccacatcccctgaaccaccggttcctttacatccgatgcaatatgggccatcacagaagatccaagacctgcctcattagaaaaaatccctctggcaattcccattttcatggcctgacgcattccataccccagtacaccgccgcccacagaccgcagctgaaatgcctcagtcactattgttgaaaacgcctggggaatatttctccaatgaacagccagaacaaaaataccgcctgcaagatagaagacagccataaaaggcacaactttttccgttacctttgctaagcgtttcacacccccgagcagcaccagtccaacagcagccattgagagcactcctgtcagaaccggcggaaccgagaaggcctctttcagccccacagccatagagttagcctgggtcatgtttcccattcccaaggaagccagaatacataaaaaagcaaacactgcagccagccacggacaatgtagccccttttctatatacagcatcgccccgcccgtccaatctccttttgagtcttttctccgatagcggattcccaaaatgttctctgcaaaatttgtcatcatacccaacagtgcagagacccacatccagaaaattgctcccggacctcctgcaattatggcagttgccacccctgtaatatttcccgttcccagtgtggccgccagcgctgtgcagaaagactgaaactgagaaatggcatgctcatcatctgtctttcgtacattacgattacgaaaaagggctacaattgtccgtcccatccacagcctgatatgcgtgaattgaaaaaatcctgtacgcacagtaaacagaatcccaaccgccaaaaacattaccagcatccccggtccccatataaatccattcaggccgtgcactgcattttttattaactctgccattacatatcctatactcccttgtctgctccatctatgtatatgcatacccggaagataagatgacgtcaggctgctttccggctgatgattatgcaggagaattatccatccccaaacactctcctgaattccaaagcatcctttagcgtatgtctccatccatacaccttaagatccactctgttctcctctcccacctgcaccccttctgcttccagcatccttcgctgcatggcgctgtcagcaaaggcacttgcccctgacagatatcctttatggtttaccaccctgtgtgcaggcacctctcctgatatcccccgattcagcgcatatcccacctgacgggagttgttcggtttgccgcacagcatggcaatctgtccataggtcgctacttttccataaggaattcttctgcagacaatccccactctttcataaaaatccatcttttgtcccgtcatataaacctatccttatgaggaaaaatcccaaattctccgcctgtatgtataaataatacatttccgtacagcaggggatttcccctgttgatttctgttattactccatgcatagcctttcctgtatataccggatccagaaccataccagtctctctggcagtttttgctataaaggcaatcacctcatcggatgcgattccatacccatcgcctacatagtcatacgtaatacacacctgctccatggatatctctttgccgaattcagcaagttccattccctcccggataatatccccagccctttttcttccgtctgcattttgatcatagatgttaaaaccaacaatcttctttttgctttcgtagtattcatttgcggcataaagccctgcgtacgtcccgccggagccgtcagtgacacagattgcgtcaaaggtaagccccatctccttctcctgttctaaaatttcttcaaatgcctgaaagtagccatacatcccgatgccattgcttgccccctcagggaggacataaactttacaatcttgctcttcgtacttccttttaatctcttccataacctcatttctccgtgagccatacgcctcttcagagataaatgtcacctttgctccaaaaagtacatccagaaaataattcccttccggatcttttggctcacctttaagaaccaaatgggttctttttcccagacgggcagccgccgcggctgtggccctggcatgattcgattgaatccccccgcaggttataaatacctctgcaccactctcaatcccttgttttaaggcatattccagctttcttaccttatttccgctcatctcaaatccggtaaaatcatcacgctttatatataattttgtgtgagcccttgagtagctcaaaccctcagggaccataatcggggtaggtaaattggcaaggctcagttttgatggtttgatcataatttcttccctcctatttttaaaattataccacggcattttagaataagaaatctctttcctataattgctgcggactgcattttttccaaaacaaaattgtataaatcttgcttttttcgtgcacaaacaatatttatatgttataattataacaaattttatagaaaggagtgcatgacactaccactctaatacataaaagtcatgcaatgttaaaagtatgggtagcaagaatttaatcgtaggccagtctggaggacctactgcggttatcaactgcagtctctacggcgttgtttccgaagccttccgtcatggtgacaaaatcgatcatgtatatggtatggtcaatggcatcgaaggtttcttagccggtacagttctggattttgcagaagcgttaccaggcgaatccttaaaaggtctgaccactactcctggcgcatatcttggttcctgcagatataaactgccggaaagtctggaagatcctgtatatcctgagttgttcaaaaagttcgaagaaatgaatattggatatgtattctatatcggcggaaatgattccatggatacggtgagcaagctttcccgctatgccgcacagatcggaagcgatatccgggtgatgggtgaacccaagactgtagacaacgacctggtgatgacagatcacaccccgggattcggaagtgctgcaaaatatgtggcatcaacagttcgcgagattgtaattgacgcgaacgtttatgaaaagaagtccgttacaattgtagaaattatgggccgtcatgcaggatggctgacagccgccagtgtacttgcaaggaaatttgtaggtgacaaccctcttctgatttatctccccgaagttgcattcgatgtagatagatttttagccaaagttgaggaatgtctggagaagaatcccaacgttatcgtttgtgtttccgaaggaatcaacgatggcaaaggcacctttatctgtgagctggataacaacgttggcgttgatagtttcggccataagatgctggcgggatgcggcaaatatctggaaaacttagtaaaaaacaaacttggcgttaaggctcgttctgtagaacttaatgtctgccagcgctgctcttcttccatgatgtcaggaactgaccagaaagaggcaataggcgccggagaatttggcgtacgcgcggcattaaaaggtgaaaccggtaagatgatatcttacgtgagaaaaagcgatcttccatacgcaattgcatacggactggaagacgtgaatcagatttgtaatgaagaaaaaaccgtacctctgtcatggattaccgatgacggttcaaacgtaagtgaagagttcgttcgctatgcccttccgttagtgcagggcagcgttgaagttcctgttggtacagacgggcttcctgctttcgtttcccgcaaataagtatttgtacagatacgttaccaagcagctgacacatggcaatttggcagctgcctgatataaatttattcaaagaaaggatgaataccaatggcattagtaaccacaaccgaaatgtttaaaaaagcctacgaaggaggctatgcaatcggtgcatttaacgtaaacaacatggaaatcgtacagggtatcacagaagcagccggagaattaaattctccactgatccttcaggtatccgcaggcgccagaaaatatgctaaccatacttaccttgtaaaattagttgaagctgctttgatcgagaatgatattcctatcgctcttcacttagatcacggcgcagacttcgaaatctgcaaatcctgcatcgacggcggatttacctccgttatgattgacggttcacatcactcttttgaagacaacatcgctgtaactaagaaagttgttgaatacgcacactcaaaaggtgtagtagttgaaggtgaacttggcaaattagcaggcgtggaagatgatgttaaagtatcagatgcagatgcagcttatacacatccggacgaagtagaagaattcgtttcccgcacaggcgttgattccctggcaatcgctatcggaacaagccacggtgcattcaaattcaaaccaggccagaaaccaatgcttcgtttcgacattctggaagagatcacaaaacgtcttcctaacttcccaatcgtacttcacggggcatcctccgtatcacaggaatacgtaaaaatcatccaggagaacggcggaaacttagcagacgccatcggtatcccggaagatatgcttcgtcaggcagcacgctctgcagtttgtaaaatcaacattgactcagaccttcgcctggcaatgacagctggtgttcgtgaagtattatggaacaatcctgctgcattcgatccaagagaatacctgaaagttggacgcgctaatgttaaatcattagtagctcataagattaccaatgtattaggaagcgataataaagcttaatttccaaaaggggacgtgttctttctaaaaagaacacgtcccaaattcatcttgccctgtccctaattcaggatcttcatcatattttgatacagaaattcttttgtactttccctgtttacatcctctatctgttcctcatgccccaggaaaataaagaaactgataaagtttgacacgaatatcatatacacatgagtccctggaatttcttttcggatacacccttcttttttcccctgctctataatcaaattgagaatgctgtccagcagttggcagttgcctttttcttttatgaactcctgatggagtgaattttgaatttcataggaattactggttattttgaaaaattgagtggtgcttctctttccaaagctgctctccagccattcaaataccccgtatatctgctccttcagggatttttttaccaacaggagttcgtatatctgccccagctgccgctccatatcaaacataagagcttccacaatcatttcctctttgctgctgaagtactcataagcagttcctttgccgatccctgcccggtttgtgatatctgccactttcattccattgatatctgcatcctcctctatcaggtctataacggcctgatagagagataacactttttcgtttctatttttgcacggactctgcgattgcttcattcccctcatcctcctgcaatcttgcttcatcttttttataattttttctgttaaaaattgaatagatacatggtactacaaagagtgtcaggaaagtaccgtaaagcagccctcctatggtaacaattgccatcggctgcaccatatcgccgcccattcccagacccatagccattgtggtcagacccaggattgtggtcagtgcagtcataacaattggacgaagcctggatttgcctgctgcaataatggcctctctcttgggcattccttcttttctcagctggttaatatagtcaaccagcacaataccattattcactatgatgcctgacagcatgacaaatcctatcatagcaataacgctgatctcttttcctgttactaaaagccccagaaagcctccggtaaaggccaatggtaccgtaaacatgataatgaagggtgacaggagagactggaactgagccaccataatcaggtacataaataccagagcaagaagcagcatgagcatcagttgttccatggcgtcatttatggtttcatcctctcctttcatttccgcggtatagccctccggcagctcatagtgttccaggatttcctgaatttcatcgctgaccagtccgatgttgtggtctccgtctatctccgcagtgacagacatataacgggactgcccatttctggtaatcgcctgaggaccaacggcctgctggaaatctgcgatatcgccgatccgtatttcttctttctctccctcgttgtttgtcacggatattttaatgtctgcaatatcttctcttgtcagcgtctcatccgtatctttttccaggaacacatcataatccttcgtgggggtagagagggtagttgctgaagatggctccgcaagcttcgcattaatagcctggaatacttgtgccactgtaagcttatgttccatggctctctctttgtttaccacaacccggtattctgcatcggtgtcttccataccgtccgaaatattctgcaatccctttacgttttctattttgtctgccagccctgtggccagagtctgaagggtatccagttcctttcccttgatctggatattaatccccgagccccccatagcactcatatccatggatgaggtggtaaccgccacttccccatcgatccccttagtgcgcttcagaatttccttctccaactgattactgtccagcttcttatcctctttcagaataagataaatctgtacagagttatcggaactgcctaatgacatggaggagccccctgccatagcacctatcgtttctatatcatcaatatcctgaatcttatggattacctcatccgctatcctggtagtatcctcaaaagaagttcccttttcagttgtaacagtaagtgatgcctctgtactctccatctccggcataaaagatgtcccctgccggatttccaaaaccatacttccggcaaacataagcactgccagaagcagaacaatggctttgtgagacaatgcccagtccatgagcagaccataggcatccctgaccttatccagctttttagaaggttttatcacagtcttcctcagcagccctgcagacatcataggtacaagcgtcagcgcaaccaccagactggcagcaagagaatatgcaatggtaagacccatatccacaaacagctgtcgggtaattccttctgtaaatacaataggagcaaatacacagacagtagtaagggtagatgccgtaatggcaccggccacctctttcgccccctcaatggctgccttctttcccggaaccccttcactccgcatacggtagatattttcgattactactatagaattgtctaccagcatacctattccaagggccaatcccgacagtgagataacattcagcgttacaccgctgaaatacatcagtaccaccgcagtgacaacactgatagggatagagcaggcaattactaacgtaggacgtatattcctcaggaaaaggaaaagaattagaattgccagaattcccccgtatatcatattctgcaggacagaatccactaccatatcaatatatacaccctgatccatcaaaacagtaacttccaaatcctcattttctgactttagctgttcaaatttgtccagaatacggtctgtgacatccccggtagagtactcagtctgtttctccacagaaagcataacgcccggctgtccgttaatcttcgcatagacttcggaggaattatctgtcaccgccacatcggctacatctgacaggtgtataggttttagtccgtccatccccatatccagaatcaccagatcctccagttcttccagattttcaaatttgtcgccaacccgcaccagatagctgatgccgtcttccatcacataccctgcaggcatggcaaagttctcccctgccagaattcccttcagcatatccagggtaaggatatcgttcagatcactgccctccatcgcactctctttggcatcatccagctgctcttttcctgcgtccagctgggtttgagcctgatcgagctggctggtgccggcatctattttagatgcagccacactcatatcaatggttgcaataattttctgcgtgtttaaagccgccagggcatcgctggcctgcaccttgcctgcctccacctgagtcttggcattttccatctcctgctgctgcaccttcagctgagcgcgtgcatcatgcagctttgctttggccgtgcgaatctcgtcccctgtctttccaagggcttccagctgctgatccatggaagcttttgctgcctccccgtcagaaacattcagctgcttaagtatcgcctccagctgttcctccagctgattccggctcttttctgcctcttctatctgtttttggagttgctcaatccttttctgaatagaacttgtatcgtccccggcagacgcttccgtcatgtcctctgcccccgaagccacatccgctgcctgagccccggcagtcagctgttcctgcaattcctccagttccttatacatctgctgcagctgtgcattatagccctcaatcccctgcataaggccttccagactggctttcagctgcataagctgctcataagctttatccgtctccgcagcagttttatctaaagcctcctccgccgcgtccagctcagcttccttgctgttaagtgcctgaatcaccggcagaaaaagatccagctgtgtctccccttttgtaagttctccctgggcgctgtgaagctttgcctcaccctctcccatctgagatgccagttcatctttccctgcatctaactgatctttccccttctctagctcttcttttccggagtccagcttatcctgggcctcctgcagttcatcttccttttccatgaaggttccgttaatggcatccctgaccttctggtttgtctcatcaaccttatcctgccggagggtcacctgaaccttctgctggattcctccggtagtacttacactggctaccccctccaggctttcgatttccgagctgaaggtgtcatttacatagtcactgatctccccgctgtccattcctttgacatcaacagcggcaaccataaccggaagcatatccggattcagtttcataatgataggtttaccgatagaatcatcccaataagatccaatctggtctaatttctccctcatctcaatggttaccgagtccatattggtactctcattaaactccagtataaccattgacatattttcactggaactggaacttacattttttatgtttccaacggtagccatggattgctccaccggctttgtaaccacctcttcaaccgtctccggattcgccccgggatatgtagttaacaccactgcatagggcaggttcatacttggcagtaagtccgtactcatttttgtaaaagatacgatcccaaggataatcaccagtaccacggcaaccacaacggtatagggtcttttcacactatagcgcgataacatatttttcctcctgctgctttattctaacatctgtcaaaccttcgaccgaccagccggtcaatgattaaaagtatactcgcatctagtgtgtctgtcaatgaatgatacctacgttttttcaataagctcccacagtttcaccggccacaaaaaaagctggggctgacatatctgtgtcctgtcagctccagcctgtctctctattcgtattccaccgcctccacggcccgcacaactgagcccaggaaagaaagagacccaaacgcaactataacgtcatccttttctgctctctgaaagctttcccgcacagctttcctgatactgctcatggcctccacctttggattatatttccgtactaattcagccagttcttcagccggaagcgcccggggattgccgggtgtctgaatggtaataatatcatctgccagtgaagcggttctcttaattaccttctcacactctttgtcctcaaacatacccataataaaatgcattctcttttccgggaaatacatagtaagggattctcttaaggtcctggccgcgtcctcattgtgagctccgtcgataacaacgataggatctttctgaagaatggtaaatctgcctctccaatgggttgtcatcatcccttcccgtatcttctcctccgagatcgcatagcccagatcccgcagggcatctactgtctccagcgctacaatggcattttcgatctgataactgcccgccagacgtattaccatatcctcataaacccgttccctgcatctgtatgaaaatatctgttcttcatatcctgacgttaccccataggcattctctttttttgccgttctaagggtgcagttttcttttctgcacttttcttcaatgaccctcattgcatccggctgctgccagtcagttaccacaacagtgcccggcttaatgataccggccttattctctgcaatctctgcaagggtatctcccagaaatgccatatgatccatactgatggatgtcataacttccaccaatgttgtctgtatcacatttgtggcatcttccaggccgcccaatccaacctcaagaaccacaaagtcacattccatctccttaaaatataaaaatgccagggccgtctctatttcaaatggtgtcgggtggggacgtccttctcctgtcatcccctcaattgcccctgcgatctctgttaccagacgggccagcgcctctctggtaatatactcctcatttacctggattctttccctgtacttaaaaagcgtgggtgatatgtatcttcccaccttataccccgcacaggtcagcacagtggaaacataggccaagaccgagcccttaccgttcgtgcctgctatgtgtacatatttgcaggcgttctcagggttattcagccgtcttaataattccctgatattatccaggcccagtacgctaccgtacttattggcatcctccagatactgtcttgcttcccgatagttcatattcataccctcttcctcaatttattgtgctgtttcttgtttcctgcgggtttcaaatttttcctgccttttgttcctctattttttctgccagatcattcagatatacccagcgttccattttttcttccagctctttttctgtcctatccttttcctctgacagttggaacagctttgccgaattcgtggcattggcagacatatcctcatctaaagatacaattttttcttccagagcctcaatgtcatcgtctatcgtttcaaattccttctgttctttaaaggagaatttcagcttcacaggcatgttctgtttccactcttttcccggggctttcttcttctcaccggtgttctttctgacggaatcatcctccgccgtctgccggtactgtctggactccagataatctgtatagcctccctcatactgctgcaggcgaccgtctccctcaaaggcaaagatacgatccacaacattatccagaaaatatctgtcatgggataccgtaatcacaatcccggaaaaagaatccagatagtcctccagaattgtcagtgtgggaatatccaggttgttggtaggttcatccatgagaagaacattagctccccctgccagtatgctgagcagatacagccttctcttttctcctcctgaaagctttcctataggagtgtactgcatggatgcgtcaaagagaaagcgctccagaagctgtgacgcgctgattcttccatcctttgtgggaatatattccgcgatatctcttacatagtcgatgactctctgtcccggatccatatccacttcttcctgagcaaaatagccgattttaactgtctctccaacctctatgtctccttcgtccggttcaaggacgcctgccagcaaattcataagtgtggatttgccacagccatttggacctataattcccaggcgctgattcttcagcacaatatagtcaaaatcgtgaataatccgcctccccccatactgcttgctcacatggtgaagttcgatagtcttcttccccattctcgtctccgcggaatccatctccacggtctgatctctgcacggacccgttccgtttttcaatgcttccaaacgctccagccgtgccctctgttttgtgcttctggctctgcagcctctcttggcccattccagctccatgcgcagaatgctctggcgttttctctccgaagccagctccatctcttctctctgggctttcatttccaaaaattctgtataattagccgtatagctgtacagatttccgtggctgatttccacaatcttatttgtaaccctatccaaaaagtatctgtcatgggtaaccataaccacaacacctttaaacttcatcagatactcctcaagccacaagaccatctcattatccagatggtttgtgggctcatccaggattagaatatctccggggtctaccaaggttctggcaagcgccaccctttttttctgtccccccgaaagttggcagattcctgtctcatgctctgtaattcccagcttgtttaatatattcctggcctcgctgtctctgctccactcattttgccggatctgttctatgacataggacagaattgtagaatccctgggaaactccggattttgaggcagataggaagtcctcaggccgttctgggcaacgatctgcccctggtccggttcttccagtccggcgatcattttcaatagcgttgtctttcccgtcccattgatccctataatacctattttatccccctcgtgaattccgtaggagacatcatcaaagataaccttatccccaaagattttgcttacatgctctatatttaatacattcatattttcacctgctgatataattttctatggctgtccggcttccccgtacatatccttgtaccatctccggctttcccccgccttttccatgaaagacaagattaaactccttcgcaaattctctcacatcctgtgtccggcttccaagaatatactggtatccgctttcatcatcccccgcaaaaactccgcagataccggtacatttttctgctcctgcattcacaaagtttctcattgcaatggtatccagccccggctggaacagacagaccgtcttctgtcccattggaatctgctccagtttctggataagaagctgttcctggagaccggcaatgcgctcctttttttcctggagctcggccagaagcctttttactgcaattgccacttcctcaggctttgcagacaacaaagcggagatttctgcaacattcttttccttcagattatagtcttccaacgccctcaggccgcacagcatactgacccttgttcctcctttatatctggcggatccagtcagtttgatgctgccgatctctccggtaaggctgacatggggtgcacagcaggcgcacacatcatacccagggatcgttatcaaccgtatctgtccctctatctctatcttactcctatattccagctgtgcaagtacttccttttccggatacgatacctgtacctgcagattagccgcaactgcccggttggcttccagctccacacgccgcagctcctcctcgttgagaggtccgctgaaatccatggtaactggcccgtccccaagatggaacccaacattgtgatacccgaaaaagcggtgaaccagccctgacacaatatgttcccccgaatgatgctgcatcctggaaaaccgcttttcaaaatctatggccccctgtattgcagagcctggctccagagggccgcgtgtgtagtgaaagatacggtcaccggtctcctgggtatcccatacttcgatcccctccaggcttccggtatcccctttctgccctcctccttccgggaaaaaagccgtacggtcaagttcaaccttccatccttcttctattgcttcacaggatatcacttctgctgtaaatttctgcaggtgactgtccctgtcaaataatcgttctgtcattcatatcctccggtctgctgttctgcagctgcattttgggccagtaccttgcctaggttccattttctaacaggcaaatccctatattgcaggtatatcctgtcatgatagctggccagttcctgactgatatattcccagtcctgcactttccattgtcttttggaaatccgggcaatctccggggctgcatcgtcggataatgcctgagtcatatagacaatgtcacggtaagacaattcctccatatggctgatattatatctggcaatccatgcatccggtctggccagggcaaatccaagataccccaccgcacctacggtaacaacaaatttaaagtagtttattttattatgataaatgctggcaattgctcctgtcaaccatattgtcaatactcctaaaaaccatagtaccaatatccggagaaatgtcaaatgatactgcctgatatacaggaccatcctgtatgcggaagagcagataagaatatacgtacagccggaaacaaccgtcagacatactttcagaatccgattttccctgacgtgttctacacatagggtaacaatggccagattcaaaagacttacaaacaaaagctcaaaaaacccctgccttgcatactctgaatacgtcattccttcaggaagccggaaaatccccccggcaaataagtacataacctgaattccgcagaataacaaatagatacctgtaagagcacctgtaacgataatcgcagtcaccggctcagcccttttctccgcctgtctattcttttgcttttttacaatattcacagcaaaaaagctgtacatgaacacaaaagccgcaaacgccatgagaaaagctcctaaaaatctggttggaataaatatattccggaacagtgcgccgaacagatgggaaaatatctcatctgctcttgcaagaagcagcaataccagtaaggatacaggcacagcaattccgactcccatataaatatattttctgcctggattctctttctttctatgctcttcccgataagctttataatgggcaaagggataatagcatcctcccaaaatatgaatgcatttccaaagaaaatgccctgcataatcttcaatgctcctattttcatttccatagatctgctctgtcataaaaagaagtaagagcaaaaaggctcccgctttatgaaaggttcttagcacctcactggcagtcagacatacccccgtacccagcagcactgccaggagtacatagatccaggtgctcttcctaatctttcttcccatatgcttcagccccaggatacagaatccgaacgtagctgcaaccataaaaggaaatgtaattcccgcaggattctgatacatacaaacagcataaaaaacgccgtacaggagagctgcagcagcgaaataccggtaatgctccttcatgaatacgatttcaggtgcctcttccctctgttttcctatatctgcggggaggaatacctcctcctgcacatcggtcatctctatactcatctgataccctccttactctttctcacaatcctcttccacatattccagaatatctcccggctggcagtgcagcgccttacagatagcctccaaggtactgaaacggatagcctttgccttattattctttaatatggacagatttgccatggtaatatccacttcctccgccagttccttcaggcccttttttctcttagccattacaacatccagattaataacaattcccataaggcacctcctaaatcgtcagatcgttttcattcttgtagttcaccgcctcatgaaatacctgagagaggaccaggctgaaaagccctcccacaagaaataccaatataataatcagggtagccggagtaataataaaaaacaaacggccccccatgacaaccgccaaaccaaatgccagacagcccataaccttgaggcttttggtattctcctccacaaaacaatttttccggagtacggttttaaatatctttctcagctgccagataatggctactgccaggataccggcccccccatagataaaaagcatctgtgtatagaactcctgaaacgaaggatagtagctccccagccacttcatccaccacgggagagaaatacaggtaatgatacctccataaaacataatatccaataataccttagtaacagaagccagatggttttgcttcataagaatcgcccctttcatttttgcgtttggtacgtaccgctacttttttatttcatttcaccatacactatatcaccagtaagaatgaatttcaatatatttttattgtttttcgataaatatttgttaaatatcaaaaaaggaccaacctcatggttagtcctctcctgctgttatgtaggggcacttcatactttctaatatagttctcatactattgttcaccttctctaattccgcctgccaatcatcctctcctttgtaccagaattctgtgacatattttcggattccgatctcccatgcggcttctattatctttctgaagtccacatgaccgctcccaaagggaacctcccggaattggcccggcttcgtttcctttagatggagtgaggttatatgtcccctaccagactgcaggtcttttatctcatcaaaccccagagatacagcggcattttttatatttccggaatccggataaatacctaaatagacagaccctatctgctccacataatacatggctttccatactgtattcatgaaattattctccatggtttccaattcaattaataccccatatgccgcagccatatgggctgctctctgaaggttatcagagaagcgcttttgtgtttcagacgtggattcctcataataaacatcataccctgggatcataataatgcgaattccaagatcatctgccagctcaatagctttttccagaatttccatccctctttcccgcagcttggcattaccgctgcccagtgaatattttgtgagggcacttacacacattgagcggacagggatgcccacttcatacatgttctgaattaatgacagtctttcttctttggacatataaatacggtttattttttcctcagtactgtcaatgcttaactccacataatcataatgagcgaatttcgctgcttccagcttctctttccagcttaattcagggggcattgctttttcatataatccaattgtataagccttcatctcttcaaccccttatgcattcagataatacatagccaactcatcgatttcccggtttgcagctatcagaatatccctgccctgtgtatgccgatagagtacgttggctgcgccgcagccatgatccagtgtacaggtccgcaattccccgttgccgtcgcttatcaatgccagcaggtccatatcaccctttctatgtccgataaatactgccggggtgctgcctatataacccttccctgcagcatgcagaaattccagtttttgaggatgctcatatatcttccgaaaccttccgttcttttttttatagacctccagcttatccccgtgaaaaggagaaaacaggaacagttcctcttccccgcactggtcaatatctgcaaaaaaagcttcacttgccggtgtttccaacagcctctctatcctccacatatctttgtcttccgacggaggggatacctcatagattccctgatgacaggcaataatacctttctcctccccatttcggcagatcttgcagtatccgtggttcttcagcatactgtcctttataacctgaagtttcaatggatggccattgtgacactgggacaaatcaaagggaagttccgctccgtatacttttccaggctccgaccagtcatccttatacttatgacccgatttcaatgtacaggcaatcagatatttctttccctgattccttagaatatcgaaacgatgcacaaacggcagctttgtaagagtctggatttcccaaccgcctgttttcctaggagaagctgtgatgatcgaggcctcactggaatcattgggggaataaaagcggcgggttgcgagaaattgtccgccgctgtccggattttgtaccatcgtcataacacctcccgggctatcccagaccacttccagcatatttccttccatatcgtaaatgcggcactctgcttctttttctgatgccgccagaaagcattcttttcctttgtagaagaaaggtgccagcgcataacatttttctaatttgcctatcacttttttctcaattctcatccgttcataccctcctgctgctttccatgcttctcatgtactgaaaaagaagttccgtcctggtttctatttcctcatacaaagcagctgcctcccggttcggctcataaaccgttctggtttcctcccatttcccggactgaaaggctgattttacatcagagaagacagcaagtgccacccctgcccctatgtaggcgccaaatgctgttgcctgaggattctccaacgagactacagggcagttatatacatcagcctgtatttgattataaacttcactttttgtcatgcctccggaaacgtaaatagtttcaaatgccgctccgtcgccttttaaaagcttaagatttttcttcgtctcaacagcaatcccctctaacactgcccgtattaattctccccggcctgtgtccagagaaattcctgtaaaggcagctctggcctgtggattccaggcacgggtcccgcagccgctgaaatgaggaatgcaggatacaccgccggaacccggaggcaccttttcaattaaagtattaatccatttataatctggcttaccctgagttccagtttcagataacagcctgcaaatccaatcgaatcctgctgagcctgacaatgaattggcctccaggatatattttccaggtatagaggcagcattgcatatggatgttaactcattttcaggtacttcctctataacagtaaccgcaaaggttcccgttccgctgttcaccaccgctgtactgtagtcccatgctcccgctcccaccgcgctgcactgctgatctcctccagaggtaattaccggtatgccgtggggtatagagaattgttttgccgcttcaatagtagtataccccacacggctgccgggcggggtcagctcgcatagcttactgctgtcaatttcaaagatcctgcacagttcgtcatcccatctcaatgtatgaaggttcatcaaatggctcctgctcccatacgtataatcggttgcaaatctgcccgtcaaatggtatatgataaaatcagcaacggttaccatcttataagtttttcggtatatgtcaggataatttctttttatccaggtaattctgctgccgctgaacacggtattcagatctgcgcccgtcttcttacgtattatgggattaaatccctgcagttcccggcagatgccggagtttctggtatcctgccacataataccgggaagaagcggagtacccgtccggtctactgctatcacggaagaacgaaatgctgtcaccgcgatcgcgtctattgcaaactcttcctgtatctgacggcagattctctgcatgccgttcagccagataacaggatcttgctctacgataccctcttttttataaatgcagggtgtctcacaggcgatttcctttactactgctttgctcccgcagtacattaccccgcgcatactggttgtcccaatatcaagaactaatatattcatataccaccacctgctaccagtatttctccaatacctctcttattatttggactccttgtcccagtttgtgtctgtctccgtacaaagcgtatacatccctggcaataatctctgtctcacagcccctggcagccagcacacttttctttatatgttctctgtagtgttccgcattcaacggcgtatccaatgccagatagtttgggctgggcttctttgagtagataatcttactgcccctcagatattcccccataagctcatcgtctgcccagggtgatacagaaacctttctgagattatccaaagtagaaaggtaatctttccagattggatttgtaggttcacagcacccataataaacaagtccaaattgttcagccagccttttatagtgaggccagtagaacgccccgtacatatcgggagaaatactgagagtttcctgtgaattcagattcacccacaagtccttcagctcgatctctccggttttaagatactgcccggatggcaattctccggtaaatccatagctgcccgctccggcgtaatcatttccattattcaggcacagaagaccttccctattcatccattgaaatgtttccagtacatcgtccaccagcattccataaagctgctgatacctttcgggacagtcgtaaggcgccagcatcatactctcaagccccataagataaattgcttttttagaaggactgaccatccagttaacagaaggaggcatcttgatttttacaggaagaatatctccaaaaatctcctccaccctttctttgtatcgatatgtatactctttatccgctctgcggacagtctttccaatcttacagaagctttcttccagattttccagatgatgtatggttgtatatcccacacttttccctctgttgtcaatcactcttttttcttccatatccaggtcaaaagttcggatatccatatcccagtatacggtaaaatatcctgggatcaccttatcgtcgtccaccagtgtgtggttcaccagctgtgtcagcagctccttttcaactgcccgcgcgaactctgtttcacattccagatccagataatcgtcaatacaatattttatctccatgaccaccaaaggataatctccccggcagctgccctgacaactattatgcctgtaccatctctcttcccgttccctcataacaggaagctgggatatctcatactgctgttttgccagctctcttaagcgcatcctgtccttttctgttaccttcagaattattttctccatttttcctcctctttaaagtgcaattaaaacaacctttggaaatacgatgcagataattaataccgctaccatccctgcaatataaggcattgagcccttaaaaatatctattacactgatatcgtctccatctgttgagccgatgtctcccagtgctgactttactgtaaatacgctcataccgaaggggggcgatataataccgatttgaattgcaataatggatattatgccaaaccagaccaaatcatatccataatttgctataatagggcacataatgggcatacaaagcaggacaatggaggtggaatccagtacgcatcccagcacaaggaagataatcataaacataataacaactaatatcggtggcatacgcagcgaaaggataaagtcttccacaaggttaatggctcccgatacagccagggcacgggaatacatttgtgctgtaatcaacaaaaacataacacttcccgtactcacccccgcatttctcaagacttctaaaaaccctcttggagtaaacttcttatttgctattaccagaagcaaagcaccgaatgccgctacaccgccagcttccgtgggagtaaaataccccatccagattccgcccaggctaacaagaatcaataaaatcatgggccagggttttagaataatactcattctttcttttcgccccatagttttaacggcttcgcccatattcggcacagtatccggtttgatctttatggtcagccagatagtaaacataaatatcacagtcgtaataattcccggaattactcccgcaacgaacagatgccctatggaggtacctgatgcggttccgtacagtatcataagtacactggggggtatcagcattcccagtatggaacttccggccacacttcccacggaaaacttcttttcatatccatgctttctcatctgcggcactgcaatcttggtaaaaactgccgctgaggctatgctgacaccggtgacagcggcaaagattgcgtttgcaactacggtggcatatcccagtgaccctttcagccttcgaaagagcagatggcaggagtcgtacaggcttccgctggcgcctgaaaggttagccagcaaacccattaaaataaacagtggggtgaccccaaatatataatctttcagtgaattataggctgtggatattaccatattgacagctacgtcatagtttcccacggccagaatcatacccacaatgctgcagctgagcaggctcacccccagatgaacccccattgcaaccaggataatcagcaataaaaatgacagtaacgttatctgcagtgtgctcatactttaacctcccgattttttcccgcaattttaaatattgtgtcgagaatatgaattacatactcaatcagcagtgttacatatccaatgaatatggcgagtttcgtcggccacgtaggaattctaagagcgccttctccctcaaactctccactggaaactgctgcaaggaatacatccagtgccgggtggatcagaattacaaaaatacagaatcctatcaaatatgaaaaaaggtccagaaaaagttttgctttgtcatttgccttgtcgtaaataatggtcgttctcacatgctttcccactgccagacagtaagcaaactgcataaatgcgatcgctacgatagagtttgccactatttctgccgttccctgaaaagaatagttgaaaaaggttctggcaattacatcaaacgttattacacacattaataccgcaataagcattgcccctgccgagctgtagtaagacaagaatgtctcataacctgatttaattttcataaatactttcaaaatacagacctccgatttgtccagaacgttattgcagctcccagtcgattaccatatcataaccgtttttgcctaattcttcccaatatgctttatatatttctattgtctgatagccggcctcgttgaattcatccactgcagactggacaacattaggtattacctccacccatctttctttttctgcatcactcaactggataatcgtcgcaccagcttcctttaatccttccaaatcactggcgtatttttccgctgtgagtttcgcttctgcttccgtatagccggctcctgtctccagtatgacatcctttaagtcttcgggaaggccattgagagtgtcattgttaaccgttagggaacccgccatcttagagccaaaatctgttagaattacatagggtgcaacctcatataacttcattccataagcggaacccaggggacaaatcatcgcgtcatacactccggtctgcatgcttgtatatccatcgtttaagctggactgcactgccgtggcaccagtattctccagccagtacagatagctggcgccgccgccgattttcattcccttcaggtcttctacagactcaattggctttgtagaatagatacagtaattatctgtcactccaattcccagggaggtctggttgtatttctggaatgcgtttgtaaactcatccgggtatttatcgaacaggcctgctgcagctttgcttaccacttcaggatccggacaggtaaaaggaactctaaaatcaatgttatggattttcagagttgacggctcaaatccataatttacataagtaaagtccaagattcctccttctactgcctccagagcttctcctaattttgccactgatccgccgtaagattttacccattcaatttcgtagccgaggctctttgctttctctgttaccgtaggtacaaaatattcttccattgccgtagtccaggtaatgttctccactacatgtccagccccgattcgaaaggtaaacttttcagacgaactgttttctttggtctcactcttccctccgcaccctgctaaaacaccgctgcacagtataatacctgctgtaagtaaagcaatactttttcttctattcttcataatataatcctttctttcattaagtatacccagggtgtcttccctgcctaatacctctcatgcccggcagtaatattcccttagggtgattgtttcagcatcttctccataattataaaattgaacaaaaaggtgtattgggttctctttcaaagcagtcctgaaatcctctgtcatgatgatattctgttttctctgcatcctgaggatagatatacctccctcccacttcccagaaaaagggatgaaacctataattcagacgttcttttttcatcctgtacagaacccgtatttcattcaaatccgccataaaatttgtccatacatcatagtgcaccggtattaccaccttacactgcagtgcttccgccatccgcagaacatcaaccgatgtcatcttatccgctatcccaaccggattttcaccaaaggacgccagtgccacgtcgatcttatgttcctttccatgttttgcaaaacagatagaatagtggctgtcaccgctgtgatatatatttcctcccggagtcttaatcagataattcaccgccttttgatccatatcatccggacaggttcctctgatgtcctccactccgtctgtagttaccaggcacgtccggtcaaaagattccagagcaagaatctccagatcttttatttttattgtgtctccgggtctgacagtaatacatcgctcctcgggaaccccccattttatccatagctctactgccttttggggaccaataaaagggatgggttcctgaacattcgagagaactgcccctgcataattcacatccatatgatcctgatggtaatgtgttgccagtacagcatctacttttcttaccgcaaatggatccagtacagccacagacgctctcaggttcggctgcagttttctccctccggacatattcgccatctgatgacccaaagccatttccttcacccgttttgttctcttccctcttccgcaccataggtcaatgctaatgttacagtctccaggtgtttttatccacaccccggtacatcccatccaccacatagctacactgccttcctccaccttctgctcctcgatctcctcattcagccatgtaccccattcgggaaaagtgtccaatatccacctatcccttgttacctcttcaattctgctcattttctctccttcctggtttattaattattttttgttcgtttatttgatgtttttattgtactattaatcaattttaatgtctattgacttatttccgataatttaattcgtttttgtacactttttacatcttttcattcgtttaaatcacttttcattcatttaatttatggttttcaaattttatatcgatattttattgcatttatctttctattgctttataatcgaactaataaaccaagtattaagagtaaggagtgttcaatatgaaccaatccaaaaacgtgattcaagaaagacagaaacggttgtttgattatattacaaaacacaattccataaaagtttccgatgccagcaggatgctccaagtttccgaactgactgtccgccgggatttggctgaattagaaaaaaagaacctggtacagagatttcacggtggggcagcactgaatacctccacagcggattatgatgttgtagtggaagaaaaaaagatcctgaacgaacatattaaaaattgcattggaaaaaaggctgcttcacttgttcaggatggttctactgtattcctgaactcaggttccacaacccttgctgttatgaaatatcttaacagcagatccgtccgcataatgaccaataatgcgcttgccccctcttctgtctggagcgataatgtagaactgataatgaccggaggagagtgccgcagccgctccaaatctcttgttggaagctatgcgcttaatgttgtaaacagtatttacgggaatgcctgtatcctgggagtcaatggaatcagcagtacttgcggcactaccacctcagtttaccaggagacctccattaatgaggccatggttaagcgctgcaacggacccgtgattatagcggcagatggatccaaagttggaaagtcctataatttcatcagcatacctatccaggatatagatattctaattacggatcccagtgcagatcccgctgaactggagaagattgcgggaaaagggattaaggttattacggttgatatctaaccattctaacttatttttaaccaaatatctcaggaaataatttcctgagtgtggcatccgaggggttaaaaaaagaggctgtcaggaaatagcattttttaacgccccgacaccccattagaatatccccgcaggaatcagggctttcatgccttttgattgattcctgcggggatgttcctttcacccttttctgttgtttcgcgtagttacaattctcatcccagcttaattccgggatcattgcattgtcatatcatccatttgtaccagcttttatctctccacccccttacgcattcagataatacatggccagttcgtcggcttccatgtttgcagctatcagaatatccctgccctgtgtatgccgatagagtacgttagccgccccgcagccatggtccagtgtataggtccttaatcccccgttgccgtcgcttatgaatgccaacagatccatatcacctcttctatgtccgataaacactgccggggtgttaccaatataacccttatctgccgcatgcagtaatttcagtttttgaggatgctcatatattttctgaaaccttccatccctttttttataaacctccagcttgtccccgtgaaaaggagaaaccaggaacagctcttcctccccgcactgatcaatatctgttaaaatggcctcacttgccggtgtttccagcaacatttctatctcccacagatctttgccctcccgtggaggggatatctcatagactccctggtggcaggcgattacccccttttctaccccatctcggcatatcttgcagtatccatggttcttcagcatactgtcttttatgacctgaaacttcaacggatggtcatcatgatactgggataagtcagagggtaattccgctccgtatacctttcctggatctgaccagtcgtccttatacttatgacctgatttcaatgtacaggcaatcagatattttttttcctgattccttaaaatatcgaaacgatgcacaaacggcagctttgccaaagtttggatttcccagccccctttctcccttggaaaagctgtgacgatcgaggcctcactggaatcattgggggaataaaagcggtgggtagcgagaaactgtccgctgctgtccgggatcggtaccatcgtcataacacctcccggtccatcccagaccacctccagcatatttccttccatatcgtaaatgcggcactctgcttcttttgcggatgctgccagaaagcattcttttcctttatagaagaaaggtgccagggcataacatttttccaatttacttatcacttttttctcaattctcatccgtgcattccctcctgcttttttctatgtttctcatgtattataaaagaatttccgtcctggtttcaattttctattgtacctcccttgcgctctccttaaaaacctgttataatctacgccgatacgaagtctgttgttaccatttaagctttatcaagataccccaggaggagaaatgttatgaactttattcacaacccgaaccaaatcgctttatacggggacagccaagaactgctggccgaagttacttttccaaatctaaacgcaactactgtaaatatcaaccatacctttgtagatccctccctccgtggtcagggaattgccggtaagctgctcctggaagcggcagaggaaatccgcacacaggggaaactggccctccccacttgttcctatgcggttcaatggttccgggaacatgaggaatatcaggatattttgaaataaacctgcacatactgttcctatcaggaggtattagtgctatggaaataaaaaataatctgaattcccctttggaaatgcccctttcctgtaaatcagccctggaacgtattgaacgggaaatacgggaagaggacgaacgccagaaagcagctgataaaagcagcaaaaattcccataaataactgactactgctgttgccacgcagaataaaagcggagaggatgtctccgcttttttatgtagattcctattcttctctgcacttctttggaatcttgctgttagctacctggaacctgtattcagcaatcaagtcatcctggttaaacgtatcctccagatttccattcaagtctctcaatacaaatttgtcatcgcattgatacgtcttcagtccctgtctgtcgaaccatgtgtccattctctggcctaattccttatcatctaaaacgtcttttaacaaaacagctgtttctttttgctcacccataatatgtacctcctttttatagtttttgctgcttttattttataatattatttactttttttcaatatatatagaaaattatcttttatattttttaatttcaagattatttatagttctactttactattaagtcttaactcatactcaaagcattcggtgggcttttttccgcccaccgacgctgtgcacacttgccccccatttgcctcagctgtagttatggtgggagggtgcaattccctcttctctgacgttatgtgtctgattttgattctctggttttactttctgagtaatgctgttaaacttttccaggttttttcttctgttattcttttctgactgttttttatccatgctatcacctcagtagttaggcttgccatttttacgagtactataccggccaagtattggttcttaagaaaccgtttacacttttttaaatttgttcacagattctttaattggtcatcacagaatcctcacacttattgtgtattataatacttgtaaagaggccaacaacctaacgcaaaactttttctttttcataagccagtaccccatgggtactggctctccttcattatagagcgtctgtttcattcactctgttgaaataagtgaattctatctgctccgcagtaaatgctgctttaggattattcatttgtttttttacttttaaaagaatacgttttaacaattcaaaatacacttctctgctatgaaattctgaggggtttctcacacatacaatctgaacacatttttcgtccatcttgcatccaagcatctccccgcaaaccaatttatgctcgcatatcatagccgatatataaactccggtattttcataaacctcatccgcagctattctccagaacatctcagcctcctgagctccgaatgcctgatcctctatacagctaagtaaaataatatatctctccgttactgtcatctgcgccgaccctttttaactattttatgaaaaatcttatctatagtttacagttcttggataagactttcaaatccgggatttttttattcatttttagcggcctgctttataatctgattgatataagtacttagtcctgccaccagtattccctgggtaaaggttgtaaaaacagccattgccaactccttaggggaggaacaggagcaattagaaaatacccagattccgcaaagcagaacacccgttccgcccaacagcaggggaatatatttatccttcacaaagcttgcctttttaaaccacattccaataaaatacagcaccagagataccagaacaagctccggttttatgtagttcatcacttcttccactttgactccctatataattccttttgacatattatagaataatgggcagacaattatgagagatattttccattttcggcaattaacacgcctgccttgaatacctgacgttcccttggtcctgcagccacacattctgcaatattatcagcacgtaccagaagaaagtctgcactgttgtcctctgatatcccatatccctccagctgcaaaagcttcgcaccgttctctgtacatattttcagtgccagttccagatcttcatctcttcggaacccattcctcatggcaatcaactgagccctttctatcatatcaccggtaccatatggactccacatatccctgacattatcgtttccgccgcacacattcactcctgcattcagaagctgtttcactgaaggcactgcaggcacatatgcctgccctccagtggtaatctgaattcctgcatcggaaagcaattctgtcagagcattcgcccgtctttcctccagacttcccagacagaatgcatgacttatagtcactcgtccttgaaggccggaggctatggtatgatcggctataagttccatagtaaaggcccccaattcccctggctcatgaaggtgaatatcgactcccttatcaaaatgctctgcaagagaaaaaatggctcctatactcccttttggatcccggtctacggcagcgggatctattcccccaaccagatctgctcccagccttagagcttcctccatcaattctatggttccgggcctactcaccagaccactctgaggaaaggctaccagctctgtataaaaacagtcccgatacctctcccttgcttctaatacaccctccagacagctcaaaccgtttgccgtatctatatccacatgacttctcatggccaaagtgcccatagaaatggatctctcaataagtttccctgcctgtatacaggaatccaatccaactttccttcgggattctctctcattggcaatgcgctcagagagaagaggccccaaattattatggaaccacttcatccccagcattgtcttgtccaaatgggcatgggcatccaccagaggcggaaggagcaggcagcctgtaccgtccatatgctccgctgtcgaagaattctcgagttttcctgtctttgcaattgcagcaaactgtccattccgcagaagtaaatcatagcgtatgccatccgccaaggttacattataaattatcttctccatttcttgtatccgtcctttccgtattctctatatgacaattatatcattagttttgagtctaggcattcccgaaaatgcataagctattagccctggtacttacactaaagtcaatagtagaaaaagagaatacagatctaatttcccatagccccatatagtatttggataaacctctgcactactgcggtctgcccccctcataattaaagtgttcacatcgttaccagtaatggaggtaaaattcccctgaataatagcccattcaaacacaattgccactgcgccagatgcatgtgcagctgcggcgcctgttcctgtcagagacagatatccattattaggggacgcacatggtatttcatagcccggtgccgcaatatcaggttttaccagtccaaaacgagtgtagccccggctggaggttataagtatgctatccgtgaactgattgtaggcacttgtagttaaggcatagtaggcatttcccggagatgtgatcgttgtgtccggggttgactctataaaaaaagtgtcctctgaaatcaagtctccgccgggaagccagctgtgaaaagaaaatggattactgtcaatatttttaaggcgaacgcgccagattccctctgaggcatttcttaaccgaatcaggattaactgcgtcccattttcctcttcaattaatacattattgacccagacatatgttgaacttagtataaaatcatatgcgacacatcccttaaacgaggggtacacaataggcatagtttccccattaggggctgttatctgaacagagagcctggcccgaagatccggccatatttcaaaagcaaatgaggggtcatttctggagactctcagttcaaactccttggaaaaaggcgaggtacttatattgccgtaataatgtcctcttcggttcccttcattccccgccgcaactgttacgttaacctgaggcagctgacagagattatttatatagctgcttgttgcacccaatgcctcatgtccggtcatactggagctaatggccaaacagataacaaggggcctgcccaatcttctggcaaaggaaaatacatagcgtattccaagaataatatctgtctcctgatagcacagcgcgtcctcatttacacaaaaaatttttttcagattctgctttgcctcttttagcttaactactatgagctgagcttccggtactactcctgagaaggattgacttgcatcagggccgcctgcaataatactggcaatagctgttccatgcccgttttcatcattcgtaggcacgattgacagaggatctcctgactctaacgcaaaattaatgatctccctgttatattctgaaccaaaggtaaatccttccggaggtttttctgtctgtattgtctgatcccagatggacaggatacgggttgtattgccactgaatttgaaagcaggatgacagtagtcaattcctgtatcaatgacaccaacaatgacaccccggccatagagagagagcaagggattggactggatccgggtaatgccagatctgcttatacttaattcggatgctaatgtataaagtgtagggaatctatagtatggatacaaacccaaattgcacagatccatatccggtacttccgcatgcaatatacagtgtctttcattcagagccgtaaaggtatcgttgttctctaatatccctttcctgttattcacaatcaaatcataataattctcatctaatatcttattcatacattctcccaatgaatactatataatatagtcattatatgatttgtataaaataagtataactaattctttatctgcagcaagtttcagagaaaaacaaaaagccctgcagacattacatctgcagggcttcttttttccaggggatgagggattcgaacccccatcgacggttttggagaccggtgctctaccattgaactaatcccctttatacaactttaagtggccatctctagccacttactctttttatgtactctcaaaactacatatacgattttacatctctttttttcactttgcaacacttttccgtaatacttagatttgccttttaccagttccggctcgacttgcgtctcacctgcctgttttctgccttttagcttgctttactttcttgtgattggatgttcgagttcgctttgctctctcgaacgaccttctcactaagctcagctctcgcctttggctcggctttcctaagtgttcaggtcaagccctcgaccgattagtaacagtcagctccatgcattgctgcacttccacctctgccctatctacctcgtcgtcttcaaggggtcttacttcctttaaggaatgggatatctcatcttgaggggggcttcacgcttagatgccttcagcgtttatcccttcccgacttggctacccggccatgctcctggcggaacaaccggtacaccagtggtcagtccaacccggtcctctcgtactaaggtcagctcctctcaaatatcctacgcccacgccggatagggaccgaactgtctcacgacgttctgaacccagctcgcgtaccgctttaatgggcgaacagcccaacccttgggacctactacagccccaggatgcgatgagccgacatcgaggtgccaaaccactccgtcgatgtgaactcttgggagtgataagcctgttatccccagggtagcttttatccgttgagcgatggcaatcccactttataccaccggatcactaagtcctactttcgtacctgctccacccgtcggtgtcgcagtcaagctcccttctgcctttgcactcttcgaatggtttccgaccattctgagggaacctttgagcgcctccgataccctttcggaggcgaccgccccagtcaaactccccgcctgacattgtcccaccgccgggtcacggcggatggttagaaacccaatactgcaagggtggtatcccaacattgactccatggcaactggcgtcaccacttctttgtctcccacctatcctgtacatgcaataccgaatcccagtatcaagctggagtaaagctccatggggtctttccgtcctggcgcaggtaaccagcatcttcactggtacttcaatttcaccggatgcattgtcgagacagtgctcaaatcattacgcctttcgtgcgggtcggaacttacccgacaaggaatttcgctaccttaggaccgttatagttacggccgccgtttactggggcttaagttcaaagcttcgacttgcgtctaacctctccccttaaccttccagcaccgggcaggcgtcagcccatatacctcacctttcggttttgcatagacctgtgtttttgctaaacagttgcttgagcctattctctgcggccacatttctgtggcaccccttctcccgaagttacggggtcattttgccgagttccttaacaatgcttcttccgtcggccttaggattctctcctcatccacctgtgtcggtttacggtacgggtacaatataaacaatagcggcttttcttgacggccggctcatgggcttccctactttagttcggtccgcgtaacgccttcggattgttcagcggatttgcctgctaaactcctacttcgcttgcaccggattttccgtttccggctcccactttccttccgtgtccccacagttctgttatattgcagtacaggaatctcaacctgttgtccatcggctacggctttcgccctcgccttaggccccgacttacccagagcagatcagctttactctggaaaccttagatattcggccaaaaggattctcacctttttctcgctactcattccggcattctctcttcttaacactccacggctccttacggtaccgcttcgtcgcgttaacaatgctcctctaccaatcacttgcgtgattcctcagcttcggtgtcgtgtttcagccccggacattttcggcgcaggacctctcgactagtgagctattacgcactctttgaatgtatggctgcttctgagccaacatcctagttgtcttcgaaatcccacatccttttccacttaacacgcactttgggaccttagctggaggtctgggctctttccctttcgactgcccaacttatctcgtgcagtctgactcccgataatcaattacacggcattcggagtttgatattcttcggtaagctttgacgccccctaggaaattcagtgctctacctccgcaaatctctatcgaggctagccctaaagctatttcgaggagaaccagctatctccgggttcgattggaatttctcccctatccacacctcatcgccacccttttcaacggatgtgcgttcggtcctccactacctcttacggcagcttcaacctggacatggatagatcacccggtttcgggtctactctgactgacttttcgccctcttaagacttggtttcccttcggctccgcacctttggtgcttaaccttgccagccagcgtaactcgccggaccgttctacaaaaagtacgcggttcacctcatacgggtgttccacagcttgtaaacacagggtttcaggttctctttcactcccctcccggggttcttttcacctttccttcacagtactatgcgctatcggtcactaaggagtatttagccttggggggtggtccccccgacttcccacaaggtttctcgtgtctcgtggtactttggatcctgctcgctcttctcggctttcatgtacggggctttcaccctctctggccggctttcccaaagccgttccattaaccttaaagtcactttctgcagtccgtaaccccaggatgcacgcatcctggtttaggctctttccatttcgctcgccgctactttggaaatcgagttttctttcttttcctccgggtacttagatgtttcagttccccgggttcccttccatacgttatggattggcgtatggatggctggagtctgtccagccgggtttccccattcagatatctccggatcaatggatatttgctcctccccgaagcttttcgcagcttatcacgtctttcatcggctcttagtgccaaggcatccaccctgcgctctttgtcgcttgaccttcctgtttctatagcgttagaagcagacggtctgtgttgcttggttttctttctttgattccttatggtttcccataaggcctcggatgtctctatcttttacgtttaacgtttttagatatttttcgtatatgcagttttcaaggtacagactttagctgatattttatcagccatttaaacgaaaaatctctctttttcgcttaaatcactggtaaaaccagttatagaaacagcattcccctgctgatgtaggttagcacggtcctccgtgccggtacatgcatttagtttcttgccttttctatttatgataacctttcggtttttcttttttttaatctggcagccacctgctctcccacaccgtctccagtgcagtaccatcggccgcttaggtcttaaccatcgtgttcgggatgggtacgggtgtttcccctaaacgtatcgccaccagaaggatctgagtctttgataactcaacagtaaaacacattttccttacttcttcttttccttagaaaggaggtgatccagccgcaccttccgatacggctaccttgttacgacttcaccccagttatcggctccaccttcgacggctccttccctttcgggttcggtcaccggcttcgggcatatccgactcccatggtgtgacgggcggtgtgtacaagacccgggaacgtattcaccgcgacattctgattcgcgattactagcgattccagcttcatgtagtcgagttgcagactacaatccgaactgagacgttatttttgggatttgctccaggtcaccccttcgcctccctttgtttacgccattgtagcacgtgtgtagcccaaatcataaggggcatgatgatttgacgtcatccccaccttcctccaggttgtccctggcagtctccctagagtgcccagctctacctgctggctactaaggataagggttgcgctcgttgcgggacttaacccaacatctcacgacacgagctgacgacaaccatgcaccacctgtcttgcctgtcccgaaggaagggtcctgttacggaccggtcaggcagatgtcaagacttggtaaggttcttcgcgttgcttcgaattaaaccacatgctccaccgcttgtgcgggtccccgtcaattcctttgagtttcattcttgcgaacgtactccccaggtggaatacttattgcgtttgctgcggcaccgaacgcctttggcgcccgacacctagtattcatcgtttacggcgtggactaccagggtatctaatcctgtttgctccccacgctttcgagcctcaacgtcagttatcgtccagtaagccgccttcgccactggtgttcctcctaatatctacgcatttcaccgctacactaggaattccacttacctctccgacactctagctgcacagtttccaatgcagtcccggggttgagccccgggctttcacatcagacttgcactgccgtctacgctccctttacacccagtaaatccggataacgcttgccccttacgtattaccgcggctgctggcacgtaattagccggggcttcttagtcaggtaccgtcattttcttccctgctgatagaagtttacataccgaaatacttcttccttcacgcggcgtcgctgcatcagggtttcccccattgtgcaatattccccactgctgcctcccgtaggagtttgggccgtgtctcagtcccaatgtggccggtcaccctctcaggtcggctattgatcgtcgccttggtaggcctttaccccaccaactagctaatcaaacgcggatccatctcataccgccggagcttttcacactgtgccatgcagcactgtgcgcttatgcggtattagcagtcatttctaactgttatccccctgtatgaggcaggttatccacgcgttactcacccgtccgccactcagtcataaagtacttcttaccgaaataatccgttccttatgcttcgttcgacttgcatgtgttaagcacgccgccagcgttcatcctgagccaggatcaaactctctgataaagtgttgaactttcgttctcgagttgtccaagttcaaaattaactttggctaatttatcccttttactgtttttaaggatttttactcatcccaaaaatgttacttttttagaattttcaggttaatgtgtttcactgtttagttatcaaagtgcttgctgttgtcggctgatttcttatctcagcagcaactcttaaatattaccacaggctgttgtgtctgtcaataactttttttatttctttttatcagttatttccgtgtgactcacagcaacttttatataatatcataagcagtctgccttgtcaacaacttttttctctttaattcctgtcttgtcgacagctatattagaataccatactataatccaatctgtcaacccatattttaacattttttcactttttattttacattcttctgtttccttcgcatttcattttctgccttttataagtttctggctgcgtacggaaatatctgtcgtccctataaaaaatcatatttacaggaacataagaatcacttcatataggattggaacaagcagcgcaggaagcatatttcccaccctgatcctgttaccgaacagcaggttaattcccacaccacagatcagcacagaacctatataagaaagttctaaaatggtccgatccgttaggtagggtgctataaaatgggccagcaaagtaattcccccctgataaactcccaaagggagtgcggcaaacagcggtcctatcccaaaggatgccgcaaatatcatagtgatgactccatctaaaattgcttttgctgcaagcatagagtagtctccggaaaatccatcctgcagtgcgcccaccactgccatagccccaatacagatcaccaacgtattgctcataaatccggcaacaaaccctgtatcttcttgtgcattgacaagcttcttcaagcgctctcccagccgctctacatggtattcaatattacacgcttctcccaacaaagagccgagtaccaaagacgcgatcagcagaattgtcccctgggactctaatccattcccagcgggcttcaacataccggtaagtgcaccgcttatccctatgaaaatcacgcaaagtcccatggactgcattaagatctcttccaatcttcggggaatgtttcctttaataaaagttccaatacctccgcctaacaaaactgctgctacattaattaatgttcccaatacccaaccgccttctttttcctttgcctccatttgcttcaagaatcatcttatcatctcacactatcccctgcaatactattttccgaaaaatcataaagccacttttcaacgcaatttgcacgcttatccatatatctttttgtaggattccatgtcgctgacgaataaaaagaagaatatggtatggtacatgatcagaatttgactttacagacaattcgtattaaactaaagaaaagatgaacaaataataattagcattataccctttgcataaggaggtatcattatgaaggatcatattttttatttgctaatcatgtggggcggggctttcgtattgctgggatttggaatctatgtaagaaaaatgaaaaagcctatgcgactttggaccactatacctgtattagcctcagatgtaaaggacctgtcagcttacaaccaggaaatcagccggctgtggtgcatttgctctattccatgtttcatcacaggattgattgtattctggtatcctgttgcttctgtcattttctttgttttgtcctgtacagccggcatagcctggatagcctggcagtaccagagaattgaaaaaaagtatctcatcaaataatcacccttgtattgtttacatccccgcaattgcgggggtgtattcttatgcgcaaaagattttaatgcaaatacagatatggatttgccccccgttttggtacggcaggaatcacactgtcacgagcttccttctcagaattgtagagtctgctttgccgtagccggatccctttatggcaatcatatttcaaagtcaccaaatctccttgtatccctgtaataatggcctgtttaattctgtgtccgttttctataaagtaacagatatctcctgccttcatgctaccactcctttgccattattatataggaactaatgttcgattttcaatggtaagatctggaatctattgctccctccggctttgctttctctgcttttggcgagtctgtttccctactgcatcatggtatgcgtcaaggacttctttcttctattcaaaccgtacgccaacataacgggcggtaatggaaagtgaaatgcgttcaactgtattttccatgcactaacatagacaaagcaactgctgatactcaatgcgggtagcaaagggactagaaacatcattggtaactggtaattatttaatttttcaatgtcccgcatattcattccaagttgctgcaaaatacaatcctgtcggcgtttcttttcccttctgcaaattttcataaaaaataagtctgcttacagttcggttagggattcccgaaatcaaataaatactcaattcccggcttcgttttttcagtatataccttgtcatatgcccaatcatccaccccataatgaggacaataagcagtgacatggggataatcatataaggcagaacaccgatactgggaaacaatttcataatatccgaaaaaatcagcgaattaaaagcgtacataaagacaccgtacagacaagggttatgacataaagcaaatactcttttgactgtcttttggctataaaatcagccaaaaataagattacaaagcgacagacagctgctcttatacttgaaagcagctgtctgtcatttatggtttctcacaccgaacaaccttattttatttttcgctggacatgttatggactttatctagtttttttactggtctaatatacttaaaatactgttctggattgtaataaaaatacataattcttccaggtgctgtatccagacagtaaccagcatcagtataatcaaaagcagccattgccgcttcgatcttttcctcaacactgcagttttcctgttcataatcaaatgggccatgttcaaaaactatatattcatcttctggaatgtcttccatagacatttgggccggcacttcccctctatagtctgatgggagccgtactccccagcactctgcgcgcagtatcccccaatcgcacagcctacccttggggtcattcatataagccataatctgaccgcttccgcagttggcttcgctccccccttcgtcatccaatttgccttttatactatcaagtaatccgcagattgtttcatagtcttgtccctcaataagactttgcttttgccaaaaatcccaatatccattgctctcatagtttttaatatacaaaaatttgtgtgctggtatcgtaacaaaatatacgtttacaccttccgctgatttaatcataccgatttctcctaatccgaaaaagtaacgatcaaaagggcttatttttgtacggagaacaacaggcttaggatgcctgcgatactcactgggtgtaacaccataagttcctttgaaagctctggtaaaagcttcatgggatgagaatccataatcaagggcaatatccagaaggctcttatcgctatcacgaacctcttttaatgcaaaggctaactttctctgccgtacataatctctaaactgcatccccgagatctctctgaactttcttgttgtataaaattcagaataacccaacttccgggataaaaaacgcagggttaaagcctcatcgttatagcctttcatacactcatcaatttcatccacaattatttgaatttgtttctgccactcgtacattaaatcacctctttcaaccgtcctatcaccattataaagaattgacaatgttactgcttgattttacttgcttttgtatataagaagtttgaccttttgccatcttaaacccacatactacaaaaagccctgcagacactacatctgcaggacttcttctctccaggggatgagggattcgaacccccatcgacggttttggagaccggtgctctaccattgaactaatcccctttatacaactttaagtggccatctctagccacttactctttttatgtactctcaaaactacatatacgattttacatctcttttttttactttgcaacacttttccgtaatacttaaatttgccttttaccagttccggctcgacttgcgtctcacctgtctgttttctgccttttggcttgctttactttcttgtgattggatgttcgagttcgctttgctctctcgaacgaccttctcactaagctcagctctcgcctttggctcggctttcctaagtgttcaggtcaagccctcgaccgattagtaacagtcagctccatgcattgctgcacttccacctctgccctatctacctcgtcgtcttcaaggggtcttacttcctttaaggaatgggatatctcatcttgaggggggcttcacgcttagatgccttcagcgtttatcccttcccgacttggctacccggccatgctcctggcggaacaaccggtacaccagtggtcagtccaacccggtcctctcgtactaaggtcagctcctctcaaatatcctacgcccacgccggatagggaccgaactgtctcacgacgttctgaacccagctcgcgtaccgctttaatgggcgaacagcccaacccttgggacctactacagccccaggatgcgatgagccgacatcgaggtgccaaaccactccgtcgatgtgaactcttgggagtgataagcctgttatccccagggtagcttttatccgttgagcgatggcaatcccactttataccaccggatcactaagtcctactttcgtacctgctccacccgtcggtgtcgcagtcaagctcccttctgcctttgcactcttcgaatggtttccgaccattctgagggaacctttgagcgcctccgataccctttcggaggcgaccgccccagtcaaactccccgcctgacattgtcccaccgccgggtcacggcggatggttagaaacccaatactgcaagggtggtatcccaacattgactccatggcaactggcgtcaccacttctttgtctcccacctatcctgtacatgcaataccgaatcccagtatcaagctggagtaaagctccatggggtctttccgtcctggcgcaggtaaccagcatcttcactggtacttcaatttcaccggatgcattgtcgagacagtgctcaaatcattacgcctttcgtgcgggtcggaacttacccgacaaggaatttcgctaccttaggaccgttatagttacggccgccgtttactggggcttaagttcaaagcttcgacttgcgtctaacctctccccttaaccttccagcaccgggcaggcgtcagcccatatacctcacctttcggttttgcatagacctgtgtttttgctaaacagttgcttgagcctattctctgcggccacatttctgtggcaccccttctcccgaagttacggggtcattttgccgagttccttaacaatgcttcttccgtcggccttaggattctctcctcatccacctgtgtcggtttacggtacgggtacaatataaacaatagcggcttttcttgacggccggctcatgggcttccctactttagttcggtccgcgtaacgccttcggattgttcagcggatttgcctgctaaactcctacttcgcttgcaccggattttccgtttccggctcccactttccttccgtgtccccacagttctgttatattgcagtacaggaatctcaacctgttgtccatcggctacggctttcgccctcgccttaggccccgacttacccagagcagatcagctttactctggaaaccttagatattcggccaaaaggattctcacctttttctcgctactcattccggcattctctcttcttaacactccacggctccttacggtaccgcttcgtcgcgttaacaatgctcctctaccaatcacttgcgtgattcctcagcttcggtgtcgtgtttcagccccggacattttcggcgcaggacctctcgactagtgagctattacgcactctttgaatgtatggctgcttctgagccaacatcctagttgtcttcgaaatcccacatccttttccacttaacacgcactttgggaccttagctggaggtctgggctctttccctttcgactgcccaacttatctcgtgcagtctgactcccgataatcaattacacggcattcggagtttgatattcttcggtaagctttgacgccccctaggaaattcagtgctctacctccgcaaatctctatcgaggctagccctaaagctatttcgaggagaaccagctatctccgggttcgattggaatttctcccctatccacacctcatcgccacccttttcaacggatgtgcgttcggtcctccactacctcttacggcagcttcaacctggacatggatagatcacccggtttcgggtctactctgactgacttttcgccctcttaagacttggtttcccttcggctccgcacctttggtgcttaaccttgccagccagcgtaactcgccggaccgttctacaaaaagtacgcggttcacctcatacgggtgttccacagcttgtaaacacagggtttcaggttctctttcactcccctcccggggttcttttcacctttccttcacagtactatgcgctatcggtcactaaggagtatttagccttggggggtggtccccccgacttcccacaaggtttctcgtgtctcgtggtactttggatcctgctcgctcttctcggctttcatgtacggggctttcaccctctctggccggctttcccaaagccgttccattaaccttaaagtcactttctgcagtccgtaaccccaggatgcacgcatcctggtttaggctctttccatttcgctcgccgctactttggaaatcgagttttctttcttttcctccgggtacttagatgtttcagttccccgggttcccttccatacgttatggattggcgtatggatggctggagtctgtccagccgggtttccccattcagatatctccggatcaatggatatttgctcctccccgaagcttttcgcagcttatcacgtctttcatcggctcttagtgccaaggcatccaccctgcgctctttgtcgcttgaccttcctgtttctatagcgttagaagcagacagtctgtgttgcttggttttctttctttgattccttatggtttcccataaggcctcggatgtctctatcttttacgtttaacgttttttagatatttttcgtatatgcagttttcaaggtacatggcataacaaaatcaggaaaatgtgtcgaatgcctgcattcgtaagcatttttctgcattttggtattgtatgtgcctgcacatgactgagcagctttgctgcgaagtgccatgtacaaaccttagctgatattttatcagccatttaaacgaaaaatctctctttttcgcttaaatcactggtaaaaccagttatagaaacagcattcccctgctgatgcaggttagcacggtcctccgtgccggtacatgcatttagtttcttgccttttctatttatgataacctttcggtttttctttttttttaatctggcagccacctgctctcccacaccgtctccagtgcagtaccatcggccgcttaggtcttaaccatcgtgttcgggatgggtacgggtgtttcccctaaacgtatcgccaccagaagctttgagtacttggtgaggtactttcgaacctagtacgaaagctgttctttgcaacttggcgaggtcttttcgagcctagtgcaacagaacttcctcttaaaaaagctccctctaacagaacttcctcttcccttgataactcaacagtaaaacacattttccttacttcttcttttccttagaaaggaggtgatccagccgcaccttccgatacggctaccttgttacgacttcaccccagttatcggctccaccttcgacggctccttccctttcgggttcggtcaccggcttcgggcatatccgactcccatggtgtgacgggcggtgtgtacaagacccgggaacgtattcaccgcgacattctgattcgcgattactagcgattccagcttcatgtagtcgagttgcagactacaatccgaactgagacgttatttttgggatttgctccaggtcaccccttcgcctccctttgtttacgccattgtagcacgtgtgtagcccaaatcataaggggcatgatgatttgacgtcatccccaccttcctccaggttgtccctggcagtctccctagagtgcccagctctacctgctggctactaaggataagggttgcgctcgttgcgggacttaacccaacatctcacgacacgagctgacgacaaccatgcaccacctgtcttgcctgtcccgaaggaagggtcctgttacggaccggtcaggcagatgtcaagacttggtaaggttcttcgcgttgcttcgaattaaaccacatgctccaccgcttgtgcgggtccccgtcaattcctttgagtttcattcttgcgaacgtactccccaggtggaatacttattgcgtttgctgcggcaccgaacgcctttggcgcccgacacctagtattcatcgtttacggcgtggactaccagggtatctaatcctgtttgctccccacgctttcgagcctcaacgtcagttatcgtccagtaagccgccttcgccactggtgttcctcctaatatctacgcatttcaccgctacactaggaattccacttacctctccgacactctagctgcacagtttccaatgcagtcccggggttgagccccgggctttcacatcagacttgcactgccgtctacgctccctttacacccagtaaatccggataacgcttgccccttacgtattaccgcggctgctggcacgtaattagccggggcttcttagtcaggtaccgtcattttcttccctgctgatagaagtttacataccgaaatacttcttccttcacgcggcgtcgctgcatcagggtttcccccattgtgcaatattccccactgctgcctcccgtaggagtttgggccgtgtctcagtcccaatgtggccggtcaccctctcaggtcggctattgatcgtcgccttggtaggcctttaccccaccaactagctaatcaaacgcggatccatctcataccgccggagcttttcacactgtgccatgcagcactgtgcgcttatgcggtattagcagtcatttctaactgttatccccctgtatgaggcaggttatccacgcgttactcacccgtccgccactcagtcataaagtacttcttaccgaaataatccgttccttatgcttcgttcgacttgcatgtgttaagcacgccgccagcgttcatcctgagccaggatcaaactctctgataaaatgttgaactttcgttctcgagttgtccaagttcaaaattaactttggctaatttatcccttttactgtttttaaggatttttactcatcccaaaaatgttacttttttagaattttcaggttaatgtgtttcactgtttagttatcaaagtgcttgctgttgtcggctgatttcttatctcagcagcaactcttaaatattaccacaggctgttgtgtctgtcaataactttttttatttctttttatcagttatttccgtatgactcacagcaacttttatataatatcataagcagtctgccttgtcaacaacttttttctctttaattcctgtcttatcgacagctatattagaataccacaaacatacaaaatatgtcaataacttttttatttttctgtttcaggcaataaaatgcagtaaaaacagctgcaaatgcaaaggggggctatgaacaaccatgtgctcacagccccctcttttttgtattctctttaagctttcttcctgactcttctgaaacaggtcaaacaaataaacagcaggaatgcaaacgctaccgccatccacccccaggaatggaatttatcccaatatcctttcagatatatgatgactacaataaccggaagaatgtaggacatataaaagcggatttgtctgggcaccttaattccttcccccgcgttggcttcctttataaagttgtcccagccccatccatacttataagtgcagaacataagatataccatcgagcccagaggcagaagattattagacaccaggaaatcttccagatccataatgtttgatccctcgcctaaaggctgaatcccagaaagcacattaaaccctaatacacaaggcattgacaataaaataatcagaataatattaatccctactgccttttttctgctccatccccagaggtccatagcgaaggaaattatattttcaaatacagctataatggtagagagagctgcaaacgaaaggaacaagaagaaaaaggctccccagaggcttcctcccggcattttgttaaatacattaggcagggcaatgaatacgagactgggaccggctcccggttccacgccaaaagcaaaacaggccggaatcacaattaagcctgccattaaagcaacaaaggtatccagcaccgttatgctgatcgcttctcccataagagagcgggatttattcagatagcttccaaatattgccattgagccgattcctatactcagcgtaaagaatgcctgagacatagcggcaaataccacatttcctatgccctgggccttcatttctttaaaatcaggtaccaggtaaaaacgaacaccctcgcccgctccgtctaaaaggaccacccgcactgccaatataaccataatgctcagcagacaaatcatcatcaccttagtaatccgttctacgcctttttccagccccagcagacagatcccaaatgctaaaagtacagccagtatcatccaaaaagtcattgtaggcgctgattccaccatatgaccaaaccctgcctctacttcttttgcacttacatgtgtgaattctccccggagcattctgtaaaaatagtacaacatccacccgcctaccatagtgtaaaacatcataagaagataattcccgataatgccaaaatacgcaaagttatgccatccgctcccctcaggcgccagtgttttgaaggaggaggccacacttttctgactacctcttcctacagagaactcgcacaccataataggaaggcccaggacgactaaaaagacaagatagatcaggataaaagctgctcctccataatttcctgtcatatacggaaatttccatacattgcccagcccaacggcacaccccgcggataccaaaataaagcccagcctggaaccaaatttttctctttctttcaaaatctttctcctaactattcatattcgtaatttcgataatatcctattttatctcagatttcaactggtttttatgcgggttatacataattcatgctttcccgaatattggatacgcctgcaagatgtatcttaaactttcctttcagggcctccagattggtctgaggcaggatgcaggtagtaaatcccatcttttcggcctccttcacccgctgctccgccatgctaaccccccgcacttcaccggagagtccaacctcaccaaatattagggtgttaggatccactgcgcggtttttataactggaaacaatagaaagcacaattcccaaatcaattgccggctcccccagcttcatgccgcccgccagattcacataggcgtcacagtttcccagctgaagtcctgcccttttttccagaactgccatcaaaagatttaccctgttataatcaattcctaccgaggttcgtctgggaagtccgaaatttgtctgtgtcaccaaagcctggatctcgataagaataggtcttgtcccctccacagagcatacaactaccgagccggaggcatccaaaggccggccgctcagcattacctgggaagggtttttgacctcctccagtcctttgtcctgcatctcaaacactcctatttcgttggtagatccaaagcggttcttaacgccccggagcagccggtaagatgcatggcggtctccctcaaaatagaggaccgtatccaccatatgttctaagactctgggaccagcaacattcccatctttggtcacatggcctacaataaaaatcataaccccaagtcccttcgcaagctgcatcaggacgtttgtagattcccgcacctgagatacgcttcccggtgcggaagagatctcctcatcatacatggtttgaatagagtcaatcataaccacatccggacgcatttcttcaatgacagctttgatggtccccagattcgtctcacacagcaattttaaattctcgttaaattccccgatccgttttgccctcatcttgatttgtctcagagactcttccccggaaatatacagtacacttctctgatcctttgacagcttccggcatacctgtaaaagaagtgttgactttccaatcccaggatctcctcccacgagcacaagagagcctggcactataccccctcccagtacccgatccagctcaccgatgtgcgtaagcatcctctcttccttatccatatctatccccgaaaggctgaccggtgtctgtttttccttccgtgaggcatacaaactgccactcttttgagggctgactgtttcctccacaaatgaattccattcccggcatccagggcattgccccatccatttggaggattcatatccacagttttgacaataaaatactatttttttcccttttgccatatctcactcaatgaaaaaggccgcccagctttgccggcagccttttgctactctttctataattttacaatggagacagctacacgttctgcttgctctaattcaacactaaaggataactttccacccaaattagttttcatggttcctgcatcaacgccgtcaatagtaactttatattccgcgtcttcttccagttcaactgtaatctgtgcgtctacagccccttcaaccgagaaagacataccatcttctgtcagatttaaatcatacactgctgtacctggtactgattcatagacaaacatttcatttctctctagttttgtaatttcacgaaaggttttaaccttgtacatatctccatcatgctcataatctgataattttgacttcgaaggtaactcatagtttccaaaactgatagtaccattttcctctgtacgaattaattcctttattcctgacattttttatgccctcccgttactgtcattcatttgtatcctgttgtccggattcataccggtctttgtttgattcattatataataattttaaaaattatgctagtcatttataggagttactaaaaatttaatatcttcctttgacatggaaactgtaaccgtatccccgtttttaattctgccttccagaatctcctctgccatggcatcctcaattttgctctggatggccctgcgcaggggacgggctccatacttgggatcgtacccctcttttgctatatattccttcacactttccctcacgcggagtgtaatatccatctgggacttacagcgttttatcagatttgccagaagtatggttacgattttcttaatatgctccttattcagggcatggaacacaattgtctcatcaatacgattcaggaattcaggtttaaacagacgctttacttcatccattactccatccttcatcctctggtaatcctgtttttcatcctgaaccgaagcaaatcccagcttcttaggttcaatgatcgactgcgctccggcgttggaagtcataatgatgatggtctgtttaaagtctatctttctcccctgggcatctgtgatatgcccatcgtccagcacctgcagaagaatattaaacacatcggggtgcgccttttccacctcatcgaataaaattacgctgtaaggattccgccttactttttcactcagctgtcctccttcgtcgtatcccacatatcccggaggagatccgatcattttggatacactgtgtttctccatatactctgacatatctacccggatcatagcctgttccgtaccaaaaactgcctcagccagagccttggaaagctctgtcttacccacacccgtgggtcctaaaaacaggaaagagcctatgggacggtttggatcttttaatcctactcttccccgttttacagcttttgcaaccgccagtactgcctcttcctggccgatgactcttttatgcagaatattttcaagcttagctaaccgttttgattccgcctccgccagcttctttaccggtatcttggtccagccggatacgacatctgccacatcctcttcttttactgtcagcttcttctgtctgcagcggcgttcatatcttacctttgctgcttccagtctcttctctgtctccttctgttctgcctggagttctctggcagtatcaaaatcgttctccttgatggctgcctcttttcgcttgaggatatcctgaagagctttctccccctgtaccacgccatccggtgctttataacctgcaagctgtactttagacgctgcctcatcaattaaatcaatggccttatccggaaggaaacggtcattaatataccggatgctcatagctaccgcggcttctacagcctgatcctcaatctccaccccgtgatgctgttcgtaataaggctttagtccctttagaatggcaactgcttcttcgctggttggttcatctaccgttaccggctggaatctccgctccaaagccgcatccttttcaatatattttctgtattcatctatggtagtagcgccgatcagctgaatctcacctctggaaagagaaggcttcagaatatttgacgcatccagagctccttcagcccccccggctccgataattgtatgaagttcatcaatgaacagtaagatccctttattctccataacctcactgactacttttttaatccgctcctcaaattctccccggtacttagagccagccaccatacctgagagatcaagtacaaccactcttttacccagcatggattcgggtaccagtccccagacaatcctctgagccaggccctccgctatagcggttttccccacaccaggttctccaatcaggcaggggttatttttcgttcttctgctcagaatctgaatgattcggctgatctcctgctccctgccaattaccggatccaatttcccctgacgggccatttctgttagatccctgctgtattgatccagggtaggtgttgcactgccggcagatgatttgatcgtctttccgccctgcagatcttccttcttcagagtcccctcttcccccatagccaccaggatatcagaatataatttctgaatattaattcccattgtatgaagaagacgggtgcctacacagtcatattcttttaacatggccagaaggatatgttctgttcctacctgatcactatggtaattggctgcttccctctgtcctccctccaatatcttctcgagtcttggtgtgtatcccggaggagtatccagcaggatatccgagggaggagctatcagcttctcaattaatgccattacttttccgtcatcagcacctgcttcggtgagaaccataccggcggttccgctgtgactctttaaaagtcccaatagaagatgttccgttcctatatagttatgattgcagtccttagctgttttttctgcaagttttaaggcattcttcgcctgttgagtatatcgttctttcatctatgcctcctgctctatacttgatattcttgaaaaatctgatcaatcagttcatgtacttcctgtctagagatatttttacaacaaccctttgccaagacaaccattaattcatctttcatctcctgcagagcctgacgtttatcagcttctatagaaacaaccgcgcctctccttctgtcaattgagacaaagccttcctgtttcagtacagcataggctttatttactgtatgcatattaattcctatgttttccgctaactgacgaacagatggaagtgcctctccttcctgtattctggaagtggcgatccccaaaataatctgattcctcaattgaatatatatggcttcatcactgttaaaatcaatttgtatcagcatatgctcacctgtctttcctttatccctgattcctgatgacgaaagaaatttgcgtcatgttgttatatatagtgtagcacaaatagaatattttgcaagaaaataatgataaatacataatgaaaatactgccatgaagaaaaaaagaagcgcctacagcgcttctcctgtcagagtttgattttgcttttgcgtcagttcctttaattcccggaccaaaaacacgccgcagacaattgcagccgcagcatccgcaatcggacctgcatacatgaccccgtcaattcccatgaagagtgggaaaatgattataaggggaagcaggaatataatctgcctggtaagtgacataaagattcccagcctggacttgccgatggaggtaaaaaagttagaggtcaccggctgaatcccgttcacaatcaccaggaacataaagattctgaagtaccgctctgaaaatgtgtaatacatctcgctgccttctccaaagattgagataatctgtctgggaaatatctgaaagcacagaaatgccagaaaagacagcactgtagctgtgcagactgccagcagatacgtcttcttcacccggccgtattttctggctccgtaattaaagcctacaatcggctgtgttccctgggaaatcccaatgataattgccataaataccatatttacctttgtaataatacctgcacaggccaaaggaatctcgccgccgtacacagactgggcgccatagtaagatagtgtattattcattactatctgcacaatggtcattgcaatctgattaaagcacgcgctggcccccaaagcaaatatgtgtcggcagcagaattggctcaggtgaaaactctctctggtcagcttaacatgcctgaagtgaaatacatagcgaagactgatacaaaaggaaataatctgtccaatgatggttgccagtgcagctcccgccatccccatatccagtccaaagataaagataggatccagaatcgtattaataaccgctcctacaagcatagacatcatggaatattttggactgccatcagccagtatcagtttgctgatggcagtattggcaattagaaaagggaatccaatagaagttatcctggtataagtccgggcatagggaagcacatcgctggtagcaccaaagaacttcagcatgggagtcaaaaatacagttaccagaacaaataatgtaagtccgaaaattgccataagaaccatagcattccctgccgaccgtgcggcacgcttctcctcctcagctcccagctccaaagaaaaattagatgccccgccaatgccaaggagcagggcaatggctgtacatgtggtagacaaaggaaatgcaatgttggtagcagcatttcccagcattcccacaccctgccctatgaaaatctgatccacaatattatacagcgccgtcaccagcatagagataatacagggaacggcaaaatttataagcagtttggattccttctgatagcccaaaggattatctgcttcctgcgtcactggtttcatctacatctcctccaatcgttctttttcatcctgattcatctgaaatgccttttctgccgttttccgcagaagcgccggcaggatttccttctctccggtggttaacggtgccaaaacctcctccacacattccataagaatggacagaatctcgtcataactggccatagccttttctgtgggaaaaagatgataagttctcttatcctccctgctgggttttctttcgatatatcctttcccctccagctgggccagtgcccttgtaatgttgctgggattccggtaaacattctgaaacacacaatcctgtgtcatccccggggattcacatacttttaagatataaaagaactggctgctgttaatctcaaatttcgccagctttttatccaggtaaccgctcaggcctaaatttaaaatagcagaccattttacgaattctctcatacatagctcctttggaatttctgccgctaatgtgtttgcgcacgcaaatatcataaaacatattggtataaatgtcaagggacagggcggatcgattttgaaaaatcgatctgccctgcccccaattacagtatcaggtgaagtgtattaatattttcccaattctctggttgtattcacccatgcctccatattttctttgttggcttcatctaaaacgatggagcaatccatgataaaaccgcccccaggtgcacagatatcaagtagcttttttgtttcctcaatcacccgctctttttttccatatgccagcagcgcattgggcagatttccgcagatgcaggcggtttgtcctactatcctctttgcctctgctatgtctacctcttcgaacatataaataacttttccttttggcacatcgctgataatatccagtctgcggttatatttaccctcgcagaacacatatggggtgacgccgatgtctatgagcgccatcataagagcctttaatcccggccagtagaattttttgtaattatccgggctcataaattcgtcaataccgccgtgaagagggataaacatgtattccaggttattcgcctttgctgtgtttactgcattatgaatgcagattggcgtcatatactccaccgccgccaacagttcgtccggataatcatacacatcgttaattgtattcaggaagcctctgatattatccccaaacatatcaaacggacaagtctgagccccggctgctcccagggggaaccccagctttgcaatctccccggtaatataaccaagtcctcccagccatctggccgctgcctccccgccccgctttaacgtttccagcgctgtctgcacctccgggtccgcaaaatttgataattcaatataaagagaatattccacaggattgttgaatctcagtttggacagtccctttagtccatcaaactttctggggtataccttagtcaggaaaaaatgagtgggatcgtgtaaaaattctttgtactcctcgtccattaaatagcatttatcgtgtatctgaaaagacgcgttcagagggagtccgctgttaggaccgggacattttaagtatgtactctgcatcaattccgggggatccgcggggtacagaaccggcgcccatgcaagatccggtgagaaatcttccagaaatcctttcactcctggccagatgttccggatatctttcatagcatcatagatagagatgtcgtatcctctcgcatagtaattcccaatctttggcgcaaagggcacgcggtcaggttcctccagattcagtacctttttgatgcgctcctctctctgcaccagtgtagattcataactacccataacattcctcctttgaacgtgaaagaaacttcccttttccgcaacgggataagttcctctcctccctaaaaaaggcggaaccactaagttccgccatccgcaagtttctatatctttatagtataataccaaaactattttgtcaaataatttttctattcgtttttatcctataattcattgaattttactattttgtcagtctttttatttcttcataaatatgcaaatcccgggagctaaaacagacaaaaatcacctgttttatgccgcagcccggatgcgccttaagaaattcagttaccgcagaaaaagcaatctctgctgcctcccttatgggatacccatagattcccgtagaaatggcgggaaacgctatgctctgacagccggcctccatcgctctttgcatggaattaatatagcaattttttaagatcacagactcattgcttttcccgtcccgatatatagggcccggtgtatggattacatgtgcagccagtagcttatatcctccggtgatctttgcctctcccgctgcacacccgttaagcttcctgcactcttccagaaggccggggcctgcttttctgtgtatagctccatccaccccgccgccgcccagcaggctcgtattcgcagcattgacaatagcatccaccttcagctcagtgatatctccctgcataatctctatttgtcccaaatatctccatcctccttgacaatacgcatctcatccccctgagaaatcctgccgccgtgaatcaccctggtaaataccccttctctgggcataatgcagtcccccataatcttataaatttcacagccgctgtggcactccttgccaatctgcgtaagctccagcaccacatcattgcattgaaatcttgttcctatgggcagatttttgaagtcaaatccctccacaatcagattctccccaaatgctccgtcttccaccagagcccctttgcctttaaactcctcgattttctcaaatgacaaaaggctcacctgccgatgccacttccctgcatgagcatcgttctcaatcccatagtcctccagcacgtttacggtatgtacattatgtttctgcgtcccttttttctcactgatattcgttgccattactctacccatcatacccctcctcatgttcgggcacaattggagacttctcctgcaagaatctccaacccgtgttccagctccgatataatatattccagacattctctcactgccttaggactgccgggaagatttataatcagcgtgttcctgcgtatccctgccgactgcctgctcagcattgcccgcttggtaaactgcaggctgtaaaatctcattgcttccggtatccccggcacttcacgctctatcaccgcctttgtggcttccggcatacagtctctgggcgagaatcccgtcccccctgtcgtcagtatcaaatccgcaattccctcatctgatagataggccagctcccggctgaggcgctcctgctcgtccggaagaagcaccgtgtgaacaatctgatatccgttccgttcggcaatttcctttatcactcttccgcttttatcttcccgtgtcccctcatacccggagtcactggctactacaatcgcaactcgtttcatactctatcctcctatctgccacatcatacggccatcctcctcctgtatctcaggatctgcaaaatggtgttccctgggcttctccaggatggccttcgacatctcctcctgaagctcttcatccgttgcccctgccctcaatagtcttctgagatcccttcccgtatcatattgaaggcaggtttttagaaatccctgagaggtaaggcgtacccggttgcactcactgcagaatttgtggctgactgcgctgataaatcctatgctgcctctaaatttctcaggcttataatagcaggcaggcccatttcccagggtttcgcacaccgggtacatgattccgtatgcctcagtcagttgcttcataatctcatcctgtgtcagacatctatactgttttccatagccgataggcatcatctcaataaatctcacatggatcctgttctctctggccaagtcagccaatttctggatttcctggcccgggatccccagtgggacacaatttactttcagagatatatccggatatttcagagcttcctcaattccctccattacctgttccaatacatctcttctggttatctcccggaacacaccggaagatagggtatccaaactgacattcactccggatatcccggcctgcaccaaagggcctatgaattcttttaaaagtacgccgttactagtaagagttatctcttccaatccttcgatccgcttcagctgttttaccagttccttcaggtcttttcttaccaacggttcacccccggtaagcttaacctttttaacccccagcctgaccagaatgcggcagattttctcaatctcttcataactcaggacatctctgtgatctgccagtgcaaccccgtcctcaggcatacagtagatgcatctgagattgcaccggtctgtcacagagatacgaatataatctatatttcttccataactgtcaatcatactattactccattctcagctgaggcattcccatcagtattgaaagtctccagatttgccaccttttttctctaccaggtgaatatccgtcagtttcatacgtttatctatggctttgcacatatcataaatcgtcagaagagcaatggtagccccggtcagtgcctccatctccaccccggtcttcccctctgccttcacggtacagactgcttttacacaggaattctcttcctccgttttaaagtctacctgtgccttctgaatgagaagcgtatggcacatgggaatcagcccggccgtctgctttacagccataatccctgcgactctggcaacccccagcacatccccttttttggaagtcccctgcaaaattgcctgtattacttccggacttgcgcagatagttccctctgcagtagcggttctacatgttatttccttttctcccacatctaccataacagcatttccggaagcgtcaaaatgagttaattttttcatgccaaccatcctctactttccgaatccacaattaggaaaggtacagacttcacaggacagacaaagtcctccttcccccatagaagcaaactcttcggcagtcatcctgtcatcagccataattctgggcagcgccagatcaaaaatcgttctttttgcatacatgacacagccgggaagacctactattggaattctgtccgcataataggcaagaagaaacatagcacccgggagcaccggcgctccataggtcactatactggctcctgtattcttaatcgccagcggcgtctgatcgtccggatccacgctcataccccctgtgcagagaataaagtcagcgcctctgtctatctgtctcaggatttctttcgtagtctcctccggattatcatctaaaatcttttgttccacaatctctgcctgatactcctccagcttctgacagactacaggggtaaatgtatcctgaatccgcccgtgaaagatttcgctgccggtagccaatatggcagcctttttcttcttaaagggaagaatccggaacacaggttcctctccccctgctgcctttgccgcatccatcttttccttctggatcaccagggggatcacacgcatccccgccagcttatctcctttatgcaccacggtattgccatgcctggcagcaattgcaatttcccccaggccattgagcatgtttaatttcctgctgtctatcttcaaaagcccttctgtctctgcgatgagttcaatcttcccctctttaggagccgttgctttcatacaggagccctggcagatttctcttagaatctccgccgcctcatcttcatgaagcatgccctctgttttttcccagacaaagagattttctttccccacagaaagcaggaccgggatatcctccctggtaaccacgtgccctttccgaaacacagcatccttagtaactccttttataatctgcgtaatgtcatggcaaagcacatgacctacggcatcttccgttcgtattctcttcatggtatcctccctgtctctcttaactttactttattctatctattttaacagcatcagctcctctttgggaagggaaatatacggcgaaggccgtattccgtcctttttggccaccagccaccaaatacactctcccccctctgcatttctcacaatatagtgatattcaaagggtgcatccacgcagtcgcagacttctatctccatacagttctcttcggttctctgctgtacgggttctatgtaatgtcctctgatgcctacatatctaatttcttctgttaccggcttcccggtaaccagatgcatcttccaatctctggcataaatctcgtattcccctgttctttctgccctggatatattcttgcagcccgtaagcctggcagcctccacataccccggattcaaaaaaatccctttggtatctccggtaagcagagatctgccctgatgaataatcgtcagctccctggaaaatttatataattcgtccctgctgtgggaaaccacaagaacctccccgggaaaccgctttaaaatcttttgcacctcgtgctggaggacatcctttaagtagccgtccagtgcggaaaatggctcatccagcataatcattctgggattggtgatcagcatcctggccagagctgctctctgctgctgtccccctgacagctgtgcgggaagctgtttttccaggccctccagatggaacgtctgaatctgttctctcactttcctctttttctcctcttttttccctttcagcacacatgccagattctcttccacagacattgttggaaataaagcataattctggaacagataaccgatattcctctcctggggtctgagatttattttcttttctgagtcaaaaaatacttttccgtccagagctatccttccctcatccggtgccacaattcccgcaatgcacttcaatgtcatactttttccacagcctgatgcaccaagtatccccatgcagctgtggtcgcacgcgaactccacgtccaggcagaagcccggaaactgcctcttaattctaacctcaagcgccatattagatccacctgtttacattttttatcttttttcctgaaatcccgttaataattgccacgatcaggaatgaaataatcacaatcacacacacccagaaagctgcggtatcccagtttccggaagccacctccgaggcaatggccacggatactgtccgggttttgccaaggatattgccggccagcatggaagtcgccccgtactccccaatggccctggcaaatgcgagcacagttccggaagcaagtcccggaccggctacaggtacgattactttccagaaaatcctccgctccgtcatccccagggttctccctgcatatataatgttcacgtctacctgttcaaaggctgctctggcattgcggtacatcaatggaaatgcaatcacaaaggccgcaattacgcagccaggccaggtctgcaccatcttgatatcaaactccgtcagtagaaatttgccaaaaggccttctcagactaaagattaacagcagaaaaaagcctgcaacggtaggcggaagaaccaggggcagtgtcagaatgccgtccagtacggccttcgctgtattattcaatttcataattcccctggcagctccaatacccaggaaaaaagctaagattgtcgccactacccccgttttcagagatataaaaagagggctccaatctattgtctccagtattgaaagcatagactcaccccctttattctctgcgtacttcccctatggttacgtatattattcagaatatggtgtaaatccagcactttgaaaactggacataacagttccgtccgtggtcagatagtccaggaactcttttgcagcggtcttctccccatcgtccgcctgctcatcctttaccagacctatggggtataccgccggctccacctgatccgcccctgcctcgcagataacttccacattgtcaggcatggatgcggcatctgttttgtataccacacctacttcattgctgccctcagctactgctgttagaactgccgtcacgttcgctccctcattgatctccatggccattacctgatccagatttcccagattggtaaacaactcacgggcatactgacctaccggtacatcctctccggccagtgccagactggatgcttccgtgatcgtatcaaatcccgtcactttagtctctccccctgcaggcttgattagaacaagcttattttccagaaagttcttcacgcttccctcctcaatcagcccttcctcattcagcgcatccatttgcttggttgccgcagagaaaaagatatcgcactgcgccccttcttcaatttgcttttgtaaagtgccggaactgtccgcattatagataatattaacattttcatgttccttttcatacgcagtcttgatctcttccattgtgtttttcagactggctgctataaaaacatagatatccgtgggttcagactttgcttcttctgctttctcttcttcccctgcaggcgcccccatcttctctgtttcctttgtctgggtctcctcctgctttttgtccccgcagcctgccagcacaccagcccccatagctaccgtaagaatcattgctaataccttccttttcatcctaaaacctcccaaattttcttttctccatcttaatcctttttggaccgagtgtcaaataaaaataactcgcttttgcaatttcactacaaaaggcacagaaatcattctctctaaaatgatctctgtgccccacagttctgcaaaccgtatcctatcaactataacaatattttctcagccagtgctttcaataccccctcacatctgtacagatcagcgcaaggaacatattcgtccggcttgtgtgccatctccagactgcccggaccgtaagacatacaattgcagcctcctgtcatccctgcaatcaccgcagtatctgtatatccggggaaggcagtcaccttggcaggcgcccctgtcttttcgctgcacacttcccgcaaagtcttgagaagtgccgattgttcctccatctcaatatacggacggtccccggtaaccttatacgatacccttgcaccaggtacctctttttcggcctttttcacagactcttccaccatagaaaccgccgctttccgatcaatgggcggcgacagccgcatatccacccacatgcggcatctatccggcaccacataaggacggtacccaccctgaatctgaccgaatgttaccgtactggggcccagatacccgtgtaccgggcagacatttatctgcttcctgagagatgctgtaaattctgccatagccgccacagcatccgcccccttccagggcgtactggcatgggctgtgattccctccgccaaaatctccatccacaatcttcccttgtgagccgcctgtatctctccattagtaggctccatgtccagtacccagctctcacggtctacccacccggcttccacaacggcttccgcccctttcatattctcctcttcatccacggtaaaaataagggaaaaggggtgcctgagcgctgtctgtttgtcggctatatacttgaatgcagagattgcacaggccataccgcccttcatatcgcaggctcctctcccatagatccgatcattttgcagttctccacctaagggatctgccgtccacccttcgccgatgactacggtatccatatgacagatatataccagttggggagtctcctcttgtcccggcagacgcatcctgagattatacctgcccggcaaaacctctgttgcggttgcttctgcccccgtatttctgagaaaccatgtgatatattctcctatatttccttcctgttctccgggattggtgctgtctattttcaccagctcccgggtaagctcagctacatccatacgctccctgtgttccataacctaaccctctttcctaatccaggaactctaactcttttttgttccttttggactgatacatattgtgatccgcgagacttaaaagttcatggtagtctctgccgtcctccggataatacgcacagcccacagagaacctgacaggaatctcctcggtgttgctaagttcaaccgtagatccccccattgtcagaagtaatttcctgatatgtgcagacagcgcttccctgtccggacactggtacaggaatactacaaactcatctccgctaatccgtgccagtacctgtttatctgctttacaggaccgaagaatcccggcaatcccctgaagataacggtcaccgttttcatgtccaaagtcgtcatttacttttttcaggttgtctgcatccgccatgagaataactgcatgccccagttcctcaggggtcttgaacagttcttccatttttctgtaaaaagcacgcctgctgtaaagaccggtaagaagatcaatatctctctctttttcaatatgctgcttctcaaccatgtcttccgttacatcaataataatgcctagtatactgtttgcattagagaatgtgttcattctgataaaatgttctccctctcctggcagccggtacacatccttcccatccgtaaccggatgcagacgtatatcttccagcttcttttcaaacagtacatggtccagaagaagctccctggcctcctcctctgtcagcattaaaatatccgccactcttccggtagccattacccgtttcatgtctttattgtattcatatacaccaatgggaaccctggccgcttccagtatcttggtcaatttatttgtggtatccagaagactgtctaccatcaagttgattcttccgctcagttccttgaattcgggggtggtttccacttctaccttagtgtcaagattccccttagtaatcttctccagtctctgattcactgaggagattcctctgactacatagtaatccatatatttagatatagacactatcatgataatggaaatcagaaccagatatacagccgtgagaagacaattgctgttcacgtctttgtataagccacggttggattccgtaatccccaggatcaccgaatccccatctgcaaatacacaatagctgtcctctccgttaacctttgcagaaaatccctgattcattttcgttcccagatctacgccaatgtctgttatgttttttcctgcctgctctgcgtcagtacagcctaagatctggtaggtgcccggatctatggcatagatggttgtcccggagtcagccgtcacaagagaaaatatgtaggatagctcattctttttcatggattccaggacccggtcaggttcaagcccaatctgaacaattccctcaccgtcctctctccaaactgcagcatactgcattaatttttgttcggcggtgttgggtgtgatatcctggcataactccaattccctgtcttttagcataggcagaaaaaactgcatttgctctccggacgtaaaattaaggccaaaatactttggctctgatccggcatacagtgttccttctttgttaaaaagatggaattcatccacctgaagaagcctggcaatcttctccatctcctcctggtcctctgtaatctccggtctgtactggagaatatatgctgccgctttggcgcggatcaggcagtttgccttcagatcttccttcacctgttccgtctctttctcattctgtttcaaaatctggttgatctgccaaaacttatcctttgcatccagatacatgtcattgcgggcattatggatttgaagcacgtagttcagacatagggtgagaatcataaatgccagtataatcgtcgccagcctttttgtaatcgcttttttcatatttgacaccctgttcatttatttaaagtatctattttatttattttaatactttcccgcaaagataacaagataaacccaaagatgatgaaatggccgcctctaatttaccactttctatttaaaatattttatttatcagcagctttcacttactgcaagtcaactttcattaccaacttatcaaaatccgactcatataattgatcttgtatcaccctgtatttctcaaattcactttccgcaaaggcttttgcaatttcatgcgtcacctttcctttatccatcaagatatcctcatcattcattttaaggaaaacttccagcttagatgcccagtcctccatcgtcatgggaatgcgctttttggcctgcctttccgcataatccagatacattgatacaaactgattcaaatcctgcagctcactctgagacaaataattcttcgctatgcttacatcagatttaacaatttttccatccggtgcatttttccatgtagttagccccatatattcctttctgtgatctgctctatctactataacctccgcagcagtatggccatgaatcgcatagtgcagtttgttctgcacagtcttaaagaattcctttgtggttactgcgtcttttgaataatcgactgcagtagcgtagatatcagttatcttttgatagaattttcgctcactggcgcggatttccctgatctcatccagtaaatgttcaaaatattcctcgtcaaatatttgtccattttctaatcttttcttatcaagcacatatccttgtaccgtgtacgtttttaatactttcgttgcccattggcgaaattgtgttgcacgcagagaattaacacgatagcctacggaaattattgcatctaagccataaaactttgtattatattgttttccatccgagccagtatgtcggaaactccgacatactgaattttcctccagttcaccttcatcaaaaatatgtttcaggtgttccgtaatcgtgctccttcctttatcaaaaagctttgcaattgcatcctgagtaagccagacatcctcgtcctgaacacgaacctcgatagaatcttctgaattctgctttgtaaatactaaaaaatcaacagtactgtttctaatctggaatatcttatcggccacaaaaccacctcttccttatatatcatatctactaaaccatttgccataccaaataaatgtttgcaacgcaaaagacgaccattttcgtagcgtcttttaaagctttcactatatggtattatttgtcctaactaacgtaacttgacattattcgacaaccgcttcaggtgattgaatgttttagatatttttcagaatctctttttgtttcagaccaaacatgttccatctgatacattcttttttccttttatctgcacttaaaatgtttgttgatttttcagtttcatctgaaaaataattaccaaaatgtctgttagtctctcctcgtctcaccataagatagtgaagtaacgtagcttcatattcgcatattttaggccataatataggattcaatttctttaatatccgcctgcaaaaccgtgatgattttctcaagctccagaaactcgtttctgtccttatctgcgattgtataatttaaaaccgttgcaaggcattccatagctaaatcgagactgtctacagaatctgcatctgcaacaatatcataagttgatgccatatcgtcatccattttcattttatgaacattcagttttacaatagcctcgtggactttctgtcctatctgtacagcctgttttccaagatcacttccatatttggtaaatcgaggttccaattcacctccatctttcaaaaggcgcttagcttctaaataattatttgatttgaaatgtgcatattcttttaaaaaccaatttccatcgtcaattaattcttgacggctcttaatttctgccttattccgtaattctttctctcctttcgcaatagcagccgactctcgtatatcccaatcggtatgcactgttaaaatcgattccggttgtcagcaaatacagccacacatcaaagtccatccagtcaatgatgggagaagcggttctctgaactgcgattttcggactatctgattcacgatcatatttgtttcgtgaattggattcccttctacggataccatagaaagtaaggattctctttttatttttgaacagcgtttgaatctttctctggattgctccagttttaaaaatagtacaacaccaccgcatgactctcgatggcggtccaagctattcgcagagttcatcaaagtttttatctttatttttagacgtaacaaccagcgttttggatgttcctttttgaaacgtttaacgtactccgcagattctggaaattccaatgttgtatatccatataaatgcaggatttgctgagatcccagcgcccaatttctagtagaagccgttcctcgaggcatacaggcctcaaatcagaaccaattctatatgccttctttccgcagatcggacatactttatcatataacgggatactgcagccatcacaccaataaatagttgaactttccaattctgccctttcgccgcaaaccggacataaagacacttccgtatttacattacattttttgcatgtatactttatcatttttcctcttttctggcagttcagcgccagacgtatcttctcaatgactatagcattaacgctttgtttttttctcactttttataaagtattagtagatatacctgacaagttatgtaaataattttttcatatttttgtcgttcagtaatttccataacttattataactgattgtcatattcttaccttcttagtatgctatacatagttgtaatttttccctttttagcttaaaacttcgtttttattataccgtattttcatagggtaagtaaaccgatattgcattttacacattttatttacgcaatgtttgagaaaaactagcaatttgaatgccaatgttatttcctaaaaataattccccatcaaaaaggggacagaaaaggcgactacctcccggaagatttttcagtttgtgcaagatatttgttcttgtgcctgatttccacggctttgcttgagacaacctgcatgaggttgtcttctttcccgatatgataactggatctacaacatcgatctggaaactgcaagtaacgtagtcctattcacaaaaaaagaagaaatctcctcatcagcctgtcctgcaatcgagtcactgatgttagatttcttctcattcaaattgtaaacgtaaataacatttttctataattaagatgtaatgcaaccccacttttggggtttggatcactatatttgagaagtaaatgtaaatagacacatatctatttcatccattaaacctcatctatggcttttccaatgtcatttctatgatacttattctcgaactcaatccagtcaatggctttatacgcgtttttcctggcttccttcagatccttacccttagccgtcactcccagaacgcgtcctccattggttacgatctcaccgtctttaaacttggtccctgcatggaaaacgtagtatccatccctgtctttaaatgcttccagaccgtggatggggaatcctttttcgtatgccacaggatatccggccgatgccagcaccacacacactgccgcattgtcctcaaactgcagatcgatctgatctaatgtaccgtccacacatgcttctaccacctcaataatgtcatttttcattctcggaagcacgacctgggcctcaggatctccaaaccgggcattgtattccagaaccctggggcccttttctgtaagcataagaccaaagaagatgattcccttaaaaggtcttccttccgccgccatagcatccactgtggcctgataaatattctctctgcagaaagcatcaacctcttcggtatagaaaggacttggggaaaatgttcccatgcccccggtattcagtccctcatcattatccttggcacgtttgtgatcctgggcagaagtcatagtcttaatcgttttaccgtccacgaaggagagaacagagacttcccttccggtcataaactcttcgattaccatggtatttcccgctgtaccgaactgcttgtccagcataatggttttaaccccttcctgcgcttcttccagggtgttacagatcagaacaccctttcccagcgccagtccgtcggccttcagtacaatgggaaattctgctgtctccagatagtccattgctgcctgggcatctgtaaagttttcataggcagctgtgggaatgttatattttttcataagatccttagagaatgctttcgatccttccagaacagcagcattttttctagggccaaataccctgagcccttctgcctcgaaagcgtcaacgatcccccctaccagcggatcatccatacccactatggtaagatccaccgcattttcctttgcaaatgcagttaatctatcaaactccatagcacctatttctacacattccgcatattccgcgatgcccgcattacccggtgcgcagtaaatcttatctaccttagggcttttcgccgcgctccacgcaatggcgtgttctcttcctccgcttccaacaataagtactttcatcttgtctactccttaattctgaccttatgttccacaatctctattttatcattcgcaatcaaatcaatagctttcggcataataacccattctgcctcctccatcaccctctgctggagtgttttaggggtatcgtcctgtgaaacctccacagccttctgcagtataataggtcccgtatcagtaccatcatccacaaagtgtaccgttgcaccggtcaccttcgctccccgggccagaacaccttcgtggaccttcagcccgtaataaccggtaccgcaaaacgcaggaatcagagcgggatgcacatttataattttgttgggatatgcatcaaccatttttttaggaatcactaccagacacccggccagaacaaccagatccacctgataggatgccagttcttccaggagtgcatcataatactcctctctgcccgcaaaagcctttggagagatacatttcccagggataccagccttaccggcccgttccagggcatatacgcccgggttattgctgatgacaacctctatcttggtgttcgtaatcgttcctttggcaattccatcgataattgcctgaagattagtcccccctccggacacaagtactgccacctttagcataatttcactcctttttctccttcttccacacgtcctactacgtaaggagcttcccctgcggctttgatggcttccatagttttatccacgtcagcagcgtcaacggctaaaaccataccgagccccatattataagtattgtacatcattttctcgtcaatcttgccttgttctgccatcatagcaaagataggcggtaccggataactgtccttttcaataactgcacagacaccctctttgagcattctgggcacattctcataaaagccgcctccagtgatatgactgcaggcacgtatccgcacaccagcttccttaatactcttcaaagctttcacataaatcttggtgggagcaagaagtgcctctcccaatgtactgcccaatgcttcgtgataagcagaaagggattcttttgtcatatcgaatactttccttaccagggaaaagccattgctgtgcaccccggaggaagccatgccgatcaatatatcccctggcttcagatcttttcctgtaatcagatccttttcgtctacaatgcctacggcaaatccagccagatcgtattcatcttccggataaaatcctggcatctcagctgtttccccgccgataagagcggcattggactgggcacacccgtccgcaacccctttgacaatctcagcaatcttttccggtacattcttcccgcatgcgatataatccaggaaaaacaggggctcaccccctgcgcaggcaatatcattgacacacatagccacgcagtcaattcctacggtgtcatgcttgtccataataaatgccagcttcagctttgtacccaccccgtctgttccggatacaagggtaggcttctccatgtttttaaaggcatccatagaaaaggctccggaaaaccctccaatattcgtcaggacttccggtctcatggttttcctgatatgctccttcatcaactctactgatttgtaacctgcttcaatatcaacacctgcttttttataatccatctttctcctccgtgttttgctggatgcttcctactttgtataatttttatatcctacagcctgcagcctttcatctttggcaaccacctgttcctttaattcttccgtgtatgctttcagccttgccagcagctcaggatctgaggtggccagaatcttagctgccagtattccggcattggcaccgccgttgattgcgaccgttgctacaggtatgccggaaggcatctgaacaatagagtagagggaatcccttccacccagagaggttgtatgcataggaattccaatgactggcatcgggaagatcgctgcgcacatacctggcagatgagccgccatacctgcacctgctataattaccttgaatcctttttcttctgctgtttttgcatattcaaagaatacgtccggttctctgtgagcagagattatcttcatctcataatcaatccccagcttttccagcatatctgccgccttgctcataacaggcatatcagagtcactacccataacaattccaactttagccattgtcattctccttttttcttttgattaatctttatcatatgctgccagataaaaacaagggcagccatattacctttatcaattttactaagacttgtaattcttgtcaatgtgaattccgccttcaaacggccggttcagttcctctgttcccgggaggacaaatcttccgtccctgatcactgctgtctcctccccctctgacgttatgactgcaactgactctaattcatcatagggtatcgtaatatctgtatgacatcccaggtatgctttggcgatatcctccctgcggagaatggatacctcattatctctggcaacgatttcctttccgtccggattataaactggagtatcctccgcccagctgtagcaggtgtctcccacggcaaaatgaggtcccatcttctcagcgatcagaataggaagttttccctctatcccatacttcctggccataacataagcagctgtatttgtgcctatggcaaattcccccatagggagggtgtcatgatgaaagagcacattttcaaatatatactttttgttttcttcttctgtgtcaaaatttttgcaggtatagtctgtaatcctgccgtcctggaaagtaatctttaaatccctgtagcagagctcattcagatatatacggcttacatggaggattccctgggtaccctttaagagtggggaggtaaagacctctcccaccggaatattcacatctgccacacagttttcaaagtttgtctgtctctccggatctgccagaggatgcagggctatgatcaagtcagtctgattgtcgcctaatcccttaatatgaaccctgtctccggtgtccagagcatcaataatcctctgctgaatctgctgatatagcttataatccagggtattaatctttactgtctcacggaaaatgtccggaaaatcctctcctatctcaggtacgggataggcaataatcgtaaagcttctctcttcccctttgatataacggtttgtaatctgtcccgcttcactgtcataggttacctgaagcttttgctgggcttttgagagctgcatggcctgaggacagggcatcggcacaaatggctcctctccaaacacctctaccaccgcaggaccaccgtgcacagcggccaattccttcattttttcatatgccacctgcatcactctgagttttctctgcacgaattcctgatccagatacagggcggcatcccccctgtgatcgtaatcatactgcttattgggaactgcaccataatacccgatacgcaggtgctgtctcttattaactgcgtggcttgcggcccggtagatcaccggctgcaaccccatcttttcaaactgaagaacggccgcccttatcatcctctcaaaccccagctggaagcgtatgtttacagtcttcttctttttaatatcctttccggttgtcaaaaagccaatcctgtatccctctgtataagttgacgccatagcatcaatttcctcctgggacagtgtatttaaaaaggcggacacctgacagatattatctgaaatatactcgccgaacagataaaggtacctatcgtctctgaggtcctcttccataatgatatctctggcgaatgagagagaagggtctaacgattcccgcacccgataggccgccatctcatcactgtagtcgcttacataccagtacagggtctctcttagggtttcagctttgggaatctcatcctgaaacatattgtagatttctgcaaagagctctgctgctaccgtaaaatcccatttccgtttctcataggcatacacaataagacctctgatctctgtatacaaaaagctgagcagctgcccgtactcctcccccagaacagagactgcatatgccgggttcccgtaggatgtcccatagttggccggcaaaatgtcttcgtacagtctgtcattccaatccttcaattctttttttgccgcaatctctgcccagccgttcagcattttttccagaacctgggctgtcagcccaataaatcctgcagtcttccggaaatactccctgaaaggttccggcacagattcctccctggggatttctctaatgcgtccggttaccagctggtaacgctcgtcaatcatctcttctttactcattttttaaattcccacactccacatttttatcgatcagctgctgcatataagagcggataactctggaaccatcccctgtgtgttcatttctcttcataacctgagatttctttacctcatgttctctccacgactttccgtctgcagcatcgttgagcatcagcggctgaaaattatccagggtatgggcaaactttgcctcaggggtctttgcaagctcaaattcttcccacagttccttacacatatttccctgatcctccggaagcagaccgaagatccggttcgctgcccgcacttcccgttctctttttgtagtattgccggcatcgtcatacgcatacgtatctcccgcatcgatctctacaatatcgtggataagcaccatagtcatgaccttcaccagatccagctcttcattggcatgttccctgagaagaactgccataagggccaaatgccaggaatgctccgcatcattttcttttcttttcccgtcagacaaatatgtctgcctggtaatgttcttaattttgtctacttccagtataaaattcatctgttttatcagcctgtcgtccatccttctacactcctatcaaaaataatcccagccagcccaccatcagaacaccgttggctatagcccccactttgctgtaggtgtatgcccggttttccttggaaaagctttttaatccaatgataaatccatagactgaaacgcctatggccaccagtcccatggcccccagatacaggcccccctttccctgaaaggcaaaggaaagaaccgcccctgtgagaaacagaaggacagagatcagtgccataaccgaagaggtaatcccgccctctgactgcttcttcctggcaaatgtgtacttatatctttttcccaccttctcatctccttttcctgcgcttgtgttcaaactttatcttgtaaatcccgtggaaaactgcaaatatcaaatatcccagtacagctccagccgtattcaggatcatatcatccacatcaaagcttcctacctttccaaccagctgtatgcattccacacaaaggctcaaggcaaatccggcaaatccgataaagaacaagtttctggtattacggtttattaccgggagaatcaggccaaatggaacaaatccaactacattgcccaccagattggtaaaaacagctacaaaccctaattgttcccggtaaacccaaaaccttctgatctctttcaacggggtaagattgtatcggtatactctctctgccccctgccccctgccgaatccctccgaaaaaaacaggaagtagatgagaacaagaatatacagcacaaacaggatcgtacctatcctttttattcgccgttttgtttctttcttcaatttttcattcctcattccagacagtttaaaaagtcacacggtccgcgtgtgacttttctctatagaagttaaatcatgatctcgtatttttgttttatcaatttgccgccgtttatgattaacatcgttcccgcagcaatccctgttactaatactataatacccaggacaagattccatacacctgcccttgacaccattttgtatatcttttcactcattgcgaacactttcctttctttactcggcaccatactgttcatagtatctgtcgatggcttctttcattgcgtcgtcaattactactcttccttggtattctctattgtataagtgttctaccacttctgccatggtaacaatggctgtggtctgcagtccgtatttttcttcaatttcttttaatgcacttttggtaccttgtccccgttccatgcggtccacggaaaccaccaagcctacaggtgttacatccccctgcgccctgataatgggcagagtttcctgtatggaggttccggctgtggttacatcctcgatgatcaccacccgatccttatcctgaatggggcttcccagcaatatacctttatctccatggtctttcacttctttccggttggaacagtaccggatatctctgtcgtacagttcgctgattgccatagttgctgccacagtcagagggatccccttataagccggtccgaataatacgtcaaagtccagtccgtaggcgtcatgaatggcttttgcataatactgccccagtctgcgaagctgcgcccctgttctataaaaaccagtgttgacaaaaaatggtgtctttcttccgctttttgtaacgaaatccccaaatttcaacacctgacaatctaccataaatccaataaattcctgcttatatgcttccatgtgagtcctcccaaatcgatctttatgccctgctttttatctgcagcagaatagctggggctctcgtccgtgtgctattcctgtattattttaccacacctatcagttcttggatatcctgaattttatttttctgcatataagactctatcccttcaatcacatccagtgtagcccggggattaaaaaagtttgcagtgcccactgacacagcggtagcccctgccagaataaattccagggcatcctcagccgtggcgatcccacccataccgataatgggaagttttaccgtgttggccacctgatataccatgcgcaccgccaccggctttacacacggtccggaaagtccccccgtacggttggcaactgcaaaggttcttttattaatatcaatcttcattcctgtgagtgtattgatcagcgacagtacatctgcacctccgcactcagcagctcttgccatctccgtaatgtccgcaacattaggactcagcttcataattacgggctgtctggcatactttttcacagccgcggtaatctcttccacggcaaagggatcctgtccgaaggcaatgcctccttccttcacatttggacaggaaatattgatctccagcatatctatgttttcgtcggaaaggcggtcaaccacccggcagtactcttcttttgtctttccgcagacatttacaattactttggtatcaaacttttccagaaaaggaagatctcgttcacaaaacaccttcatccccgggttctgaagaccaatcgcattaatcatgcctccgtaagtctcagcgattctgggggtgggattcccggtccagggcgtgctggccactccctttgtcactaccgcccctaaacggttcaaatcaattagttcgctgtactccacaccggatccaaaggtgcccgaggctgtcatcaccggattcttaagctctacgccggccaggcttacttttgtatttatcataattctacctccgtgcttaagaagacagggccgtctttgcagactctcttattatgcacttttgagtgttcgtctatctcttttgactggcagacacaggccaggcaggctcccacaccacaggccattctttcttccatggagatccagcactcaatctccatctcctgcgcataggctttgatggccctgagcattggtgccggtccacaggcaaagataatctccggctcccggccctcttcctttgtcagtccattagccatcatggcatccagaacatttcccggcgtgccggcgcttccgtcctcggtagccgtatagactctgccgtatctcttcagttcctcctggagaaaaagttcatcccggtaacctgcaatgatatgcttgtccccgtccagtgcctttgccgtttctaccatagggggaattcctatcccgccccccataaggaagactctttttccggcagcacgctccagaggaaatccattgcccagagggccaagaatggagagcctgtctcccgccttcagcattgaaaactcttccgttccttttcccactacccggtataccagccgcagacttcttttatcttcactgacttcacatatactgatgggtctgggcagcacccggctcccatcacggctgtatacggagacaaactgtccggggcttgcttctttcgcaatctcttcggtcctcagccacatgctgtatacatcactggcgagtttctcctggctgagtatctgactcatctcatttgttttctttgacatatgcgtttctcctgttctcttatctttccagggcactgctgatatcctctatcatgtccagtgctgcctggcgtgcagaatcaccaaaattttcaggcccgaatttcgcatatttttcttgtttgtaggatgcgataatccccctggaggaatttacaatcgctcccagtccatctttattgaagaaatgaaccagatcctttccctgtccgccctgtgctccatagcccggcaccaggatatatgccttcggcataatcttcctcagaatctttcccatctccggataggtggcacctacgactgcacctacataactgtaggtatctcccatatgggtttctccccactctgccaccttttcgcccaccagttcatacagtggtcttccgttcaccagctgatcctggaaatctccgctggagggattggaagtctttacaagcacgaagattcccttgttttcctctctgcatacctctataaatggttggatgctgtctgctcccatataaggattcagcgttgcaaaatcctcgtcaaagcccgcataggtcttgtcacccacttttacttttcccagatggcccactgcatatgcagcggaggttgatccgatatcaccgcgttttatatctccaatcactaccagatccttttctctacagtaatctactgtctttttaaaagcagtcattcctggaattccaaattgctcgtacatagcaatctgaggctttactgcaggaattatatcataggtcttatcaacaatctctttgttaaactgccagaccgcctctgctgcaccctccaaagtctctccgtattcctggaatgccttcttctgaatatgagccggaatgtagttcagcataggatccaatcccactacaatcggcgcgtttgtcttctgtatttttgctaccagcttgttaatcatctgtattcctccatattatcatgcttccgattcatttttaatcctgataaacgatttgtccgtcacagattgtcattttcacttttccggtaaccttacgtccgtgaaacggcgtattcttacctttagaatcaaactttctggcatcaatgatatattccgcctttgggtctataatcacaacatccgcaggtttgcccactgcaagagagccccgctcactgccgatcacctgcgccggattatagctcatcttttccgccatctgcataggcgtcaaaatccccggctccaccagttcactgatggtaagcgctaccgatgtttcaagccctactatcccaaaaggagcttttttcatagactggctcttttcttccttgctgtgaggtgcatgatcggtactgatcacatccataatattattcttcagcccctcttttaaagcctctacatcctcttttgtccgaagaggaggattcattttatagttggcatcattctctttgatgtcatcggtagaaagggtaaaatggtgagggcatacctccgcagttacgtggattccgtcctctttggccatctccaccatcttcacactttcccccgtggaacagtggcagagatggagttttgccccggtatctctcgccagcagaatatctctcgctatgattacgttctccacagaattggtaatccccggtagtcccagttccctggctttttcatccgcattcatgcagccgccgttcaccatattaatgtcttcacagtgagccagaaccggtatgccgcaggctgctgctatttccattgcttccttatataactgcgcattcattactgactttccgtcttcactgatggcaggaattccctcctccaccatgcccctgatatctgccagctcctcgcccttttgtcccatggtgatagcacccacttgaagaacatggataggcgccagctgttccgcctttttgtgaacataacgcacccggtccgggcggtcaatcacgggcttcgtattaggcatggccagtatggtagtgaatcctcctctggctgccgctctcgcaccggaaaggatatcttccttatactccagcccgggatccctcaaatgcacatgtatatctatcagtccgggcataacaaaacagcctttcgcgtcaatcaccctggctgcctttactttcagcttttcgccgacttcttttatcttatcttcctgtataaaaacgtcacatactttatccgtctgggtgtccggatccagtacacgtccattcttgattaagatactcatatttttactcctttttactccttggatattatggtttatatcttgattttaatagtatcatacccaatttcgtacgtcaaattatagttttgtgtatgtgaagttcggggttatgcagtcgtcgagcgaggcgttgctgacggacggatataggagggagcaccggggaggcagggccaggccaggggctccctcctatatccatcctggcagagactcacttcacattcacggaaaacgggtggggaaagtcgagagttgtacacttttcatattattcatcatttatgatcgctcgatgttttggataaacagccaaacctgttaccgttatcacttccatactttctggctacattacagcatattctatctgacaaatttacaaccctatcttatgtagagaatagcattccccttctgaaaaacctacactctggaactcccccatacccaggtgagaggaatcctgcggcggcgggctggctggttcgggcgggagggaggcttaagctccgcggacggttccgcaggagtgactagagagtcttaagcaaaaccgggattcccacaggagattttttcggcagtccgggccgaaaaaaagtgagcatgggcagagaatgcacatcaagcattctttgcacatacgaacagtgctcctgcggggattccggttttgtcttagactctcttcgcgacggaggtgtccccggaacttaagcctccctcctgtccgaaccagccaacccgctgccgcgggatttctctcaccgtccccccgccacctcacactttccgacttgaatcactttgagcagaaatccatccccactttcacctgatatttaactctcatttttttgcaaaactcttatttttttccttgactttttccagttttcagactatacttaatggtgtcaaaggatttattggatgtaaagtaattcactagttattagagattatatttatacacaatatgatctgtaatagctggtggattttttattttccagtatttttatctattatttatttatatttatggaggtaacatcatgaacaaaggaactgttaagtggttcaatgcggaaaaaggttatggatttattactggagaagacggagctgacgttttcgtacatttctctgcaatcaatggcgacggattcaaatccttagaagaaggccaggctgtatcttatgatttaacagaaggcgctcgcggaatgcaggcagctaatgtagaaaaattataatataaagcgaagttgaggactgctcttattatgtaagggcagtccttttttgctgctccggcaaatgtcagaaaaaacccccgggtatggcagtacctgggggttttagggggaataaatcttattttttaggttgatgttttgtttttggcttaattgggtatttcttttatttattcactacattgattggattgccggcaacgaaggcctttaagtcttctacagcaatgtccatcagtctctgtctggattcctttggagcccaggagatgtgcggtgtgatgatacagttctttgcctgcagaagggggttatctcccttaatgggctctgtggatactacatccaggcccgctgccgctacttttccgctgtttaacgcatcccttaagtcttcctccacgataagaggacctctggagttattgagaatgataacaccgtctttcatcttggcaatgttttctttgttaatgattccctgtgtagatgggaacagcgggcagtgcagggctataacgtcagcctgggcgaataattcttctctgcttacatattctgcaatttccttgccgctgtcgtttggatattcgtcgttggcaattactttcatacccagagcttttgcaatacggccggttgcctggccgattcttccaaaaccaataattcccatagttttgtccgccagctcaataaggggatagtcccagaagcaccagtccgggttactctcccagcgtccctcatggactgccttgtcgtgatggccgatgtgatggcagatctccagaagcagggcaatggcaaactgacctactgctgcggttccataggtaggaatattgcataccggaatgcctttggcttttgcagtgtcaacgtcaactacgttgtatcctgtagccagaacacccacatattttatattcgggcatgcgtcgaatacttcttttggaagaggagtcttattggtaatgaccgcttctgcatcaccaatcctgtcaattacttcctgcatatctgtcagagatgtgcggtcataaaccgtaagttccccaagtgcttccatatctccccaggataaatctcccggattctctgtatatccgtctaaaacaacgattttcatacttatcttatcctttctcttactctctttacccttacgtcgtaacatggtatgttatgatgtaaatataacacccacgtagcgcctcgtcaactttttctttgctttgtctatacatggattagttgagtatggcagtctttccacattaagataaaattctttatttttggcaaaatggttttacttttcatatgccccggcgtaccttcccggaggtgtgcgccgggaccgggtttcaggattagatctgtggattttccggatgcagcatggttgcgattactttgtccaggacctcatctttccagatgtctttccagttttctctcataaccagacggtttccaagtccgatggccactttgcacgcatcggataccggtgggtttccggggatatagcccagaaagttagctgacagattatagatatggccggtcaggaaggacactgctgcttctttcggaatgcctctctttactgcttcttccacggtctctgccatggcatataagcaggtagctcccagaagctctaccagggtaggctctaagaatgcaatctgctcagaggacatcacatacgcatgctctaccggcgcatacatttgttttgctacctccacacactgtgcgaaacggtcatcgtctccctgaatcttggacattacgatatcctgttttccgcccatacctccgaaacggtcctggcgtgcttcaaaggtatcctgatccaggaaataggagggatggcagggatgagctactccaaaggtgcagtcctctcttaaggtcagctctcttgccactgctgctgcagggtccaagatgatgaatccggttcccggttttaactggggtacatagatagcggaaagttttccgattagagtatccggcactgcgaacaccactacatctgctttagacagcgcctcttctaccggagtaggctcaaagcccctgtctttaatactctggattcctgcctcggttgcttctaccagaagcagttcgaaatcctccggcttttttgccaggttgttgctggttctggttcccatttttcccccggcaccgattacacttactacgattttgctcatgatctcttcctcttttccttttgttctggcacaccggttttgagaaccggtatgccgcttataggtcattgtattactgattgtgaattataaattttcttttacagtctttgcgatattctccggtgaaaatccgtagtaatctgccagttctttggcaggaccggactctccgaaggtggtaagtcccatgcgctttacaaatttcggggcgttctcaactgccagcttgcttatgtatgctcccatgcctccgtttacattgtggtcctccacagtcacaatcttcttagccttcttaatagcctcgatgatcttctctggattctttccgtataaaatgttgatatctcctacagtcacgttcacgccctgctcttttaacaggtctgcggctgccagtacacggtccaggacaaatccgctggataagagcagagtgtcatccccgtactctcttaagatggtgatgccgtccggtgagaaagaggcttctttctcatagacatctgcttctcttccgcttcctgctcttacatacaccggaccgtcaatctctgccgccatctgtacagctttgtaggtctggggaccgtctgccggggttaaaatggtgtagtttggtatgttggaaaggatgcccaggtcttcatagaactgatgggtaaccccttccctctccccgcccaaaaggccggagttgattcccacaaactttacattcaggttcgggtaagctacaaaggtacgcatctgctcgcaagcacgcatggtcataaaccctgcataggtgcccacaaagggggtcagtcctgcagctgccagccctgcggcggtatccactgcattttgctcggagattcccacctccacgtactgatccggatataactctgcgaatttggttgcacgcattgcttttaatgagtcaggtgaaacaaacataattttgtcatctattgctgctaaatcgatgagtgccgcagcaaaggcttctctcgttcccttgaattctgccattatttcgcacctcctaattctttcactgcctgctggtactgttcgtctgtgggcactcctttgtgccatgcattgtcattttccatgaaagaaagtccttttcctttcacacagtcgcacacgataacgcttggttttcccttggctgcctttgctttagcgatggctgccttaatggcgtcaatatcatggccgtcgatttcctgggcatcccactggaaggcctcaaaacgctctttgatgttgttggcaccgatggtctcctccacggagcccccgctctgccagccgtttttgtctacgaatacaatgaggttatccagcttatggcctgccgcggagttaatgccctcccagcacacgccctcctgaagctccccgtctccggcgatgacgaatacattgtagtctttctttctgtatttgccggccagggccattcccccggcaatggaaataccatttcctaaggaaccggacgtcatatccacccctttggttttattcataaccgggtgtccctggaacttgctgcccagggctctcagcttaaaatcttcgatcttgtctccaaagtatcctttttcagacagggccgcatagtagatagggcaggcgtgtcctttggataagataaaacggtctctgtcttcccagtccgggttagcgggatcgattctcatctcatcaaagaacagagttgccacgatgtctgcaatagacagcgctggtcccggatgtccgtcctttcctttataaaccatgtccacagctgtcattctcagatgatttgccatttgtttcagttctgcggtattcatgctaaaacctccttaaaatatgtttttataagttgtaagttactatcaaacccccatcacacccggaagccaggtgataattgccggaataaaagtcataaccagcaaagttgcaatctcgacacagaggtatggaataatccgtttgctaatcttaccgatactggtgttggcaattccagaagcaacaaacaggtttactgccataggcggcgttatcatgccgatggatgtattgataataatgatgatacctaatgcgataggtgataatcccagggatgtcgcgattggcaacaggattggggttaccagaaggataattgactgcgtttccaggaaacatcccaggaataacagaattacgttaatcatcagcagcagtgccactttattggtgaacagccccagcacgctggacgcgataaatgtaggaatgttctgatttgtcataaaccaggcaaatggagctgacatactgaccacaaacaataccactgcagagcttactgtggatttgcgaaatatttcgtagatgtccttcattttcagttctttgtaaacaaacacactgatgataaatgcatacacacaggcaactgcggcagattctgtgggggtaaataacccgccgtaaataccacccaggattattaccggcataaaaattgcaaggatagcttccttaaaggagtgggcgaaagctctcagtgtaactttaccagtctctgctgcatcatattttttacagattacaatgttggtagcaatcagaactactgccagcaataatccggggataacacctgccataaacatggttcctacagatacggaagccgtaactgcataagtaaccatagggatacttgggggaattacaacccccagggtgccgccggaagctgcaacagctgcagcgatatcgtccggataccctttttgtttcattctgggaacggtgatgccgccgatagcagcaaccgttgccgggttggaaccggagatagctccgaagaatgcggatgccactacggtaatacaggacagtcgtcctggaattcttctcattaatatttctataaagtcaatcagtcgtttggagattccgcctttttccataatgttgccggccaggataaagaaaggaactgccatcagggtgaagttatcagcctgagtaaacattctctgggcaactgcgggaagcagattcatattgccgctggctacaatagccacacatactgcaattccaaggcagatggcaatggggactcccaggaacagcatgacgaataagactccaaataacattcctataatcattgttccttatcctccttctgctggatttcttctactgtctcttttgctgtaactctttcataggtatgccatgcatagcagagggccatcaatatcaatcccagagggatagacagatacataatccacatgggccaccgcaggctgggtgttatctgtccgctggcaatctgcttctgcaggattgtgattccataataggaagcaaataagctaaaccctaaaaccaatacagcatccagtacatatatcactttcaggaccgctttggaacaaaacagttccaaagcctccacacaaaaatgttctccattacaagcggcaacaccgatgcccaggaagataatccatatcatgcagtatctggcaagctcttccgcccaggggattacgaataatcctgtaaaacgggcaacagtggcaacgaagataatcacacacatgataatcattaatattaccaaaagaacttcttccgctctccttagtccgttaaatagttttttcaaagtgtccacctcttctacttagatgactgaatcttttcaaccagttctttgttcagatttaagctgtctaactgatcgtatacagcatttgcagcttcctgccatacagctttgtcaacctctgtaactgttacgccggcatccttcattgtctgaattgcttctttattatagctgctgctgtactctctctgataatcctttgcttcttctgctgctttgtcaaaggcttctttctgtgcgtctgtgaagccatcatacgtgctctgtgaaatcatcagtacgcagggagaatagaataagtcaatcatggatacatatttctgtacttcatacaccttggcagactcaataatcgcaattgggttttcctgtccgtctacggttccctgctgaagggctgtgaagatttcactccatgccataggcgttgcagtagcgcccaatgcctggtaagtagccatatgtacgttgttttccatggtacgaatcttcataccttttaaatcatccggcgtcacgatttcctttttgtcgtttgttacttcacggaatccgttttcccagaaaccaactcctttgattccctggctgtccaactgacccagaagagaggttccaacttctccgtccagtaccttataagcctgttcttcattttcgaataagtaaggaaggtcaagaactgcgaagtcagatacaaagtttggtatcggaccggtagaaatcaggcacatttcctgtactcccatccctacgttttccatcatatctctttcattgcccagctgagagttgggatagatatccagtgtcatctcgccgtcgctgtattcttccagtaatttctgcatttcctgcagaccttttacgtagtgaccttcaggagctgtggttgtacccacttttaatcgcacggttgcactgtcggctcccagcatagtatcttcgccgccctcagtatctgtacttgcagtactgctggaagactgcgtattagaagaatctgtgcttcctccctcgctcttgtttccgcaggcagtcatagttcctactaatgccactgttaaaagtgctgctaaaatcttgtttttcatatccaatctcctttttctcaattcatttgttatccgttaaacatctgatgttttatgtatatcatttatcgcctgatttgtcaactgttttgccataatttttcaagatttatatgcactttgtcaaatttgcataaagatatgcaagtaatattatgcataataccttatatctaatatttgacgtatgatgaatattcatgttaaaatattatcaactattaaaatatttaagcgctgcttacgaatatctaatggttgtgggactaactatctatatgtattgggatggaggacgggaggtgaaaaaatgagcaatttattcgaagcaagcaagcgtgaatccgcggtagaccttgtagtaaacagcattaagcagcttctcatggagaggaccttaaagccgggggataagcttcccagtgaactggagatatcggaagacttaagtgtcagccggggttctgtcagagaggctatgaagatcctttccgcctttggtctcgtggatatacgggtggggaacggaacctatgtctgcgaaacaccgggaaatacgattatggattctcttctatttagtttttttgtatcgaatccggatatcgaaaatttatatgagttccgtcatattttcgaaaatgatattctatccatgattctagagcactacgatgagaatggcaaagagagaaaagcactccgcgacaatctggatgaactggaggggatgatagcgaaagggtcttctgacaaaaaactttccgagaacgatttagaatttcatagacttttgggacaggcctccaggaatctgctggcagaacgggtttataattttattattgattttatggaaccttccatcgcggcaacccataaagggcaaaacggggaaatcgtatataaaatacaccgtgatattgttgaattgatagaactaagagatgccgcaaggattgatgaggcgattacgaactctgtagatacctggtctatcctgcagccgtcctcggcaatgaacccctggagagaataagcacaaaacaaggacaggaaaataacaacctgtccttattttgtgcctatttgtttgacgtataatggtttttttggtaaaattagtattattgattaaaatcggagtgggatgaagctatgagtaatttgtttgaggctagtaaaagggagtctgccgtagatgttgtggttaacagcatcaagcagctattgatggaacggcgtctgaaaccaggagataagctccctaatgagctggagatttctgaggggttaggagtaagccgcggttctgtcagagaagccatgaagattctgtcagcatttggactggtagatatcagagtgggcaatggcacttatgtatgtgaaacacctggaaatggattgatggattcgctgctgttcagcttttttgtatcaaatcctgacatttctaatctttatgaattccgaaaggtatttgaaacagatatactggaactgattctggatcattacgacgataatgccctggaaagaaaggaaattgcagataatctggaagatctgagagtgctcattgagagcaaggctccccaatccagaatcacacagaacgatctggagtttcaccggcttttgggtctggcctgtcacaatcagattgccgccaggatctatgcatttgtcatggactttatgcaggcctctatcactaatacccataaacaccagaacggagagtatgtgtataatacccatatggaggtgtaccgggtaatagaaagcagagacagcagccggattgatgaggtagtgaataaaactgtggaagtatggtacaagcttcaggattaaaagaacaagcctgttcagccggctaatcagtcagctgaacaggctcttttttagagatgtctgtattcccggtggtctttcttaatctgatcaaacaactcctgttctgttgccattcggtacatcagcatactcagaatcagagcagaatccttcattccctgatacgcctggggcgtctgaagaagctctgcaaacttcttgtcatgaagtacaatttccttatggccgttggtaatatccaccattggatggaatacaggaatctttacgtcaacgttgcccgcgtcagaggaacctgccggcttatccggtatgatgctgtctctgcctgtcagggcaaataactcctgcagaaaatgtgctttgaattcattgcagaacatctcaccatagtccggatagcgctgctggatctcaaaggtagtttccgtacacatacaggccccctccacgcaccgttcagccttggcattcagatcgtgcaggccgtccagagtcgcagaacggaaataatagtccagagtaaccttttcgggcactacgttcggtgcatctcccccatactctacgattccatggagctgacaatccggagtgatgtgctgtctccacatatccatggcatccatatagatccttgccgcattcagagcgtttctgccttctaccggtgatgcagaggcatgactggcctttccatggaaagtaatatagcggtcattggacgccaaaactttgaaaaatgcctgattctcattattcatatgggccatggctgcaaattcatagccgtcaaatccgccgttatccgtgattataatcttaccgcccacaaattcttcccccggtgttcccataaggtccacacggataggcagctctttgtacgcctcgttcacagccagtcccgccagaacgctggaggcacagctcagagaatggccgcatgcatgcccaacctccggaagcgcgtcgtattcacacataagcacagctttctttccctcatagttcagccgatccttatgtactgccagaaaggaattgggcataccggcataaggtgttgttacctcatatccctgtgatttgaggaattctacaatgtaggcacaggagttcacttcctccccgctaatctccggatgcgtggtcaggtagtctgccagagctttgcatttctcaaaatagatctctatctgctgctgaattcgttctcttccatcttccattatctttcctcctgttctaaatgtttttccataaagatacggtctaggccctcgtactttatcatccgatccacctggcggtagcccgcctttaaaaaattctcgtaactgtgcttattgtccggcgaaacagttcctaaaatagtccttttgccgttctgtctgcatatcccgcacataatttcttccagaatgttctgaatcccatttcctctgtactccggatggatatacgtatccacataatccgcacattcctccagcatcttgcctgtgtacctccgatccaccccatattctacatccctgagggtacacaaaaggcatccgataacccttccgcgaatcagggctacaagaccaaacccatcctctatggcttttataaaatccttccgttccgcctgtgcaaataatgccttattctccagctgttcccaaacaaactcccgaagtctcatagcttcctctatccggtcccaggtcagcatgccgatttccatatactcattttttttcggtaaaaaaacttcgtctatcattttcactctccgcttcgggcaagcccatcctactttctactcaaaacggggcatccccacatgccccgtttttctaacttatttctcgtatttaacaatcagtgcgtcagctacccctacaccctcaccttccggataaacaaagattggatttatatccagctctttgagttcatctttattttcacttgcatatttggaaatgccaacaattgtgtcgcagagggcatcaatgtcacaaggctggcttcccctgtatccagtgagaagtttaaaggatttcagtgacttaagcatctccagagcttcctcatggttcagtggcgcaggatacagagcaacatctttgaacagttctacaaagactccgcccattccaaccataatcataggaccaaactgaggatcgttatttactccgataatcatctccacgcctgccttcagcattggggagatcaagataccattaattttggcatcgggccgtttagctgtaacgttttccataatttcattgtaggcctttgtcactgcctcttccccgctgatattcagtttaacaccgcccacatcgctcttgtgcaggatatcggcagactcaatcttcatggcaaagggcgtatctttaccttttgtaaaggcaatggcctcctccagagaagcggcaatgattgccttcggtacagctactccgtactgttccagttcttttttactgttaaactcagacaatgcataggagtttttggaagcaggctttccaggagccagttccagagttttcatctctgcatgatattcaataaagtcagagagatagcggagcagcttaaaggcatataccgtcggcggcagaattggtactcctatttcaaacagcttagtgctgtattctggatttcttgtgttttctgcaaagggcagaagtgcgataggcttacagttgccttctttcaccactttttcaattcctttgtacatatagtgtatcgcgggatctgcgatttccagcagcagggtatagccaaccagaaccattccgatattcggatccctcataactgttctgagggcctccgcgaataaatcttcatcatatgacaaggttgccgtcatatccaaaggattattgggtgtggcatagctgggaagctgctcctttaaacttgccagcgtctctggctcaaaatccgggaattccaggttatactgacttcccacgtctgcgcagataccggtttctccccctgacaggctcatggaagtaaaggttgccttttcaggaatagaaggcatggtagccatcatggatgacattgccattaattcttccaaatcatctacacggatagcgccgaattttttgagcaccgcatcaaaggacttatctgaacctgcaaggcttcctgtgtgggaagctgcaatggctccgcccttcgcgcttcttcctgtcttcaaaataatcacaggttttttcttctgcgcagctttcttcagcacggctgcgaatttctcagtgttttttacaccctcgatataaatgctgactacctttgtattctcatcatctaccagatagtccatatagtcttccatctgcaccgcttttccgtttcctgcggagatgcagtaggaaaaacgcatggacggacactccatgagggacaggcagagctgaccgctctgtgacacaacgcctacgcttccttttctgtctctcttctcagagataaaagcaaatgcctgcacatcatcaatgtaattgacaaaccctgcacagttcggacccataattgcaatgccaagttcttccccagtttcgatgagttctttctcattggcgcggccttcgtctgttcccacctcgccgtatccgctggcaaatactacagcaccgcccacaccttttttagccccgtccctgagaagcggaacaactgttttctgagaggtacagataatcatcagatccactgtgtcctcaatgtctaatatactcttgtggcacggtacgccaaatacctggtcacgcttcgggtgtacaaagtacacccggcttctgtcttttacataagttaatatattacggcaaacgtctccgccaaagccttctttttcgcttgctccgatgacagccactgactttggttttaaaagtttcgttaaatccatttttttacccccggcgatttcttattttacttctgctcccttttcaaagcactgcgcgttcttgggattgttctttccttttttcgcaaagaaagaatcaatcgcttctctcagatactcttcggtaaatacgtcactgttggaggccagtgctcctaacattacgatattggctcctctgggattttccagctcttttgcgatatcggttgcagcaaccttcactactttgatatcatcccggtaggtacggtcgtccggtacgatagaagaatttaccagtaaaagtccccctggtttcagtctcccttcaaacttgtcgatagccggaccattcattgtgagaacgatatccggatgcttacatacaggacttgcaatctgttcttccggtgtttcactgatcttcaccgcgcagttggcagttcccccgcgcatctctgaaccgtaagaaggatagaacaatacgtttttcccctgttccatgccagcattaattaataacattccggcagttaatacaccctggccgccgaagcctgcacaaataatctctgttgccattgcctattcctcctttttatccttgaactcacccagcgggaagtatttcaccatctcgttagaaattctttccacactcttaaccggtgtcatatttaagttggttggacatggagacaataattctaccaggcagaatccctctccggccatatgtttttcaaaggctttccgaaccatttttttggatttgttaatatttgcaggatctgaaagcgctcctctggaaaggtatgcaatatccagaccgctgaatgcatctacaatgttaaagggcatgccgcacttcttcggatccttgcctctcggggtagaagtagtcttctggcccggaagggaggtaggagcacactgtcctcctgtcattccgtataaactattattgataacaatcgctaccacattgtcgttgcggattgctgtatgcatagtttctgccatgccgatggagtatgcggcaccgtctccgatatatgccataacaggattctcaggacggacttttttaacgcctactgctgttgcaatgggacgtccgtgtgccgccataatggtgtcaaatctccaggaatcaatatttaaagagccgcaggcaacgtctacaattgccagcaatttttcgcttaatcccatctcttccataacttctgcaatgatgcgcacagccagaccatggccgcatcccggacagaagccgctctgggtaaatgtaacggtatcaggagcttttaacttcataattatgcctcctccttttctacatctttcagcatctgctcgattttagcaatgatgccttctgtttccggtatctcgaaaatagatccaaagtggtctaccgggaattttccgccggttgccagcttcacgtcatctaccatctgtcccagaatgttcatctctaccgtaaggaatgctttcgcattcttggcctcttcgaacgcttttacaggataggggtataaggtgatgagccggattaaaccaaccttcagtcctttttctcttgccacctgtacagcctcccggcatacacgggagctgattccaaaggcaaccagaactacctctgcgtcatccaccatgatattttcatagagctgctcttctgcttccatcgcagaatatttgtctctcagataatcttcataatccggattggtgtaatagatattctgaatcttgcgctgctcatcgccttttttgcaccctttgatagaccagtcaaatttgtcaatatcatgatccacaaattctggaatctctactgcttcaatcatctgtccgatggccgcatcagaggcgacgataaccggatggcggtatttttcagacagatcaaatgccttgtagatcaagtctgcattttcctgtacggaagccggtgccaatacgatagtacgatagtcaccatgtccgccccctcttgttaactgccagtaatctccctggccctgagcgatatccccaagacctgttccgattctcattacatctacgataactgccggcagatctgccgctaccagataggagataccctcctgtttcagggaaaatcccgggcccgaagacgttgtgagtgctctggctccggctgccgctgcccccagtaccatattgataccggccagctcagattcagcctgaataaattctcctcccacgtcctccattctccaggagagatattccagaatctctgtctgaggagtaatgggatatccactataaaatctacagcctgctgccagtgcggcttcagcaagggcttcatttcctttcattaataccttagccataatatacctccattatcgtatttcaaatacatagtcagggcatacccggtagcaagaaccgcagcatacacatttttcttcatcaacttctatggtgttataacccttttcattcacgtgctcggatacgctgatggcatcctttggacaggcgttgatgcagtagccacatcctttgcagcgcactgtgttcgtataaactttttccatatggcattcctctctttattctgatttaaactcactcagcacttgctgatttctgattttttttgttcctgatgtagatatacattgccagaattgctcctacgatagcacttgcagccaggaaaccaaagattcttgtatatccgtctgctccgtatttatccagccagcttccaaacattgtggaatagatagagtcaggcatataaccgatgatagaagcaataccaattgccgttccagtcatcatacgggggattcccgcctcgctcataatggagaagataactccgtacatcatcattgcaaaggcacctggaatcagagtataaaggctgaccgccgtggggctcattccgctgggcagtaagagtacgcctgcgaagagcgccgctaaaattaccagggcacaggttaaccacttggcagtggatttgaatactttatctgcgataagaccgcctacgggtgacagaagcagaagcacatagcttcggataatggttatagctcctgaacttgatgcggacattccctttacttctgtaagataaggagtaaagaaggatgtgtttgcaaaaataccgtacgcgcagaatatagtaatggatgcaatccatacaattgggttcttcagaagttttccaacatcgcccatcttaaacttactgtcttcgccctcactcgccgtatgagcgcctgccttgctgtccatcaggaacatcaggagaactgcggctacaacggcaaccgtaccgcctgtcactacagcccggaagaatccggtaacgatctcatcttttgctgtattataagcaaataatgacagagactgtgtcagagcgcctgcaagtccgttacaggcataataaagcccgtacataaatccctgttcctcttccgttccgataatacggaccgccttcatcagagatgaccagaatatgaaagctgtggagaaggataatcccagccagatgaccagtgcaatcttataatcaaaggtaaatgcgtagatatagcatagacctgctgttgccagaagcgagactaccaaagccttcttaggcgaaattttatcggctaagatgccgcccggtatgtataaaatcatatttccgatcgtgtacattgtaagcagaattccggtctgggtatttgaaattcccatagctgcaacctgtgcgtcataatacacgtacttgatatacggtaaaaagtaaatagcaccaccagcgaggccgagagcagcaaccgtcaaatattttcttaatttagaattcatagaagacctccttcatgagttgtcttatgttcatgatacagttacggggtgcccgctgcttgccgtgacacccctttattcacattttttaaattttagttgtctggagtatcggatttgtctggtgtaaagatttcttttgcaatgtctcttgtaaatcttccagtctcttttgccttttcaaatactaatcttgtattcttgcggatcagtctttctgtatcatcaacgatttcctgtggaaccttatcacagatgccgaagataactacttcatagattcggattccgcctaagttggatacgaagtcaaccgctacgtcaatgcctttctcgcgaaggatttcatctgcttccggagttgtaggaatgttggcagcttctaccaccagggaggcctttaccttgtctgcattatctttattgataacatcttccagagctgcggggatgataatatctacatccatctctaaccattgagaattaggcagtttctgataattgtcttcaaaagcttccggattcagttcgcctttgggaagtcttgtctctaccaacttaggaatatttaatccgtccgggcagtacagaagctgattaacatcggcaataccaactaccttatatcccatcttgtccagacaggtagcaaggctggctccaacacatccgaatccctggatgataactgtagctccctctctgccttccttgatcttccatgcttcatctgtggcaaacgctacaccgtatccggtaatcatatcatacatcttaaatccgtcatatgtcatgtcgcatacttcgtcgtgattcttaattccctgctcaatcttgggatctgctttcatggcttttgtctgtggtaagccaacgccgatgtcatccaggattctaagcacatctccgtagtcaacacccaggtcaccgccgattgatacgcctgcattcaggtaaggtgccattgcaaccatgaatctttctaatacatccagagcatccggtgctttatagtcataagcaataccagctttacatccgcctgttgtctctgattcacaggctttatacttataccccatagctgttgcaagacggataacctcttctttggttactgtaggatgcatacgtgttccaccaccacaataatggttaacgaagttatacatacataaccacccttttgcatcactctctgtgtcattccactccactacgatatacggtttgtttgccataagtaaatcctccttttattttgttcttgattacggaacagcgttcttgattttggttagaaggaaaactcggttggcagtccgagttaaactgtttttgcgttccgtaattaagaacttcattctgtattgtgtaactagatactaacacacttggttaatgttttcaatatcgaattgatgcttttttattttttatgaatattgcacaaattttaaagccttttttctatctccgcggcgtatttcttaacgacatctgtaagtccgctttttcgcttttcctcaatgcggagggagggaccgctgacgctgataccggcctccactactccgtggcggttaaatatgggcactcccacacactttattccgaattcgaattccatgttgtcgaaggcatatccatttctgcggatctctgccaattcctcctttaacagagctttatccgtaatcgtatagtccgtaagtgctattagctctttactcaggtatctctctacctcgtcctcagggagatatgccatcatagattttcccacactggtgcagtacattttagcgcgctctcccaaaagggagcgcaccggatgaatggactctgacggataaatggcctccagatagatcacctcatcctcatggggtatagccagatatacaatctcatccactttttttacaatctcctgcatatagggaatggcaattttcgttatgctgaaactgtctcccagagcacggcagaggggaaagatactgcttccaagatagtatttccccgtctcctcatcctgctccaggtattccatagccttataggttgttaatatattatgcacgttgcttttatataatcccaacttttcactgatttctgtaacacccaggggctgcttttcagcaaaacaattcaaaatttccagagccttctgcagacttttcactttaacttcagaagaatcaatcatagattacccatttctcctttcatcgttctctatctaagaacgtctttaagcaaattatagagcataattactatttcggcaagtgggtatcttatcttatgtcttctatatctccggcatatcctggatatccggttcaaagagcttcatagcagactctctggcatagattccttcttctacagctgctttcatcagtttacctgcatttcttctgcacagggcctccccttctctcaaaacagtatttaattccggttcaaccacaccaaagaatacggcatcataaaaccatgcctctgacaggtttgctgtaaaatcacaaataagataaattcccttgttctttaatattttatctgcctccggtgaaacaggaatattagccccctccaccagcagttttgcgcgcactcgctctgcgttatctttatgtatcacattgtccaaagccgcggggatcaggatatcgcactcctgctccacccactgttctgtgggcataatatgataggtttccggtaattttgtcagatccagttccctatgacctctcttaagttcatatagtagctctgtatccagaccgtctttgcagtacacacatacttttgagtctgccattcctaccaccttatggccaaactgctgtatctttttagcaatggcagatcctacacggcccatgccctggattacaactgctgcactttcttccgtatccggaagatagctccatgcctcatctgcggcgcaggccaccccatatcccgcgatgacatcattgatcggcctgccgtcaacggtaagatccagcatcttattatacgcctgcatgttcttctcaatccggggatctgcagccatacttttagtcagcggcatctcaaatccaaattcccggaacacttccagcatatccccgtatttggtacccagatcccctcccagagatactccggcctttatatatggcatcatggctatcagataccggcgcagcacagctctggcatccggtgccttgctgtcataggcaatcccccccttacagccgccacagtactgggattcacatgccttgtatttatatgccatagtcttggccaggcgttctacctcccgaagtgttacgcaaggatgcatacgtatccctcctccggtatagcctttcacaaaattatgaaccaccatccatcctttggcattcgtctccgtatcattccattccactgtcaaatatggtttcatttcttactaagctcctttgcctttattcgtatgtttcttcacaaattttacaaaatttgtccaaatcaatattcccgcctgtaatcaggcagagtacttttttgccctttaattcctcatgttcctcgaacagggcgcccaggcaggtagccgatgctccctcaatcataaaatggtgcttagaagccatccattgaattccctctctggtggttctctcatccaccacaaaaatatcatccacacaggtcagtgcaagctccacattgggccaagtaatcgctccctccagtccgtctgcacaggtaggcagaaatggacatgaattgtccaggcgcttttcatggaaggatttaagccatggcgcagaggtattggtctgtaagccatacacctttatctctgggttcatagccttggctgcaatagccacgccgcacaagagtccgcctcctccggtaggcactaaaatcgcatcaaagtctcccttttccagcagacattctatggcaactgtcccttgccctgcaattgtctcaggactctcataggcatgtataaacttcctgccggtctcccttgcgatttcataggcctttttctcagcctcctcataatttggaccatataccaccaattcagctccgtactttagagccccctcacgtttattcatgggcgtggattccggaacacacacaaccgcagaggttcctctgagcctggccccgtaagctactgcctgagagtgatttccggccgaagccgccactacccctttctttacctcctcccccctcagagacatcatattgttcatagccccccgtatcttataggctccaatggactggagattatccatcttaaaccacacttcgcttccggttcgatcagatgtgggctttgagtatatcaggggcgttttcataatatagggttgtatcagcgcatatgcctcaacaatatctttcattgatacctgtatcaattatgccacctccccctttgattttccttctttctgccagggataagactccctgcaaatctcacaaaagcgctccggatcaatatttcccccactgatcaggcaaagcaccctttttccctgcagcgcctcatgccgctcaaacaaggctcccaggcaagtggctgccgccccctcaatcattaggttatgcatgacagacatccacttaatcccctcccgcaggcttttctcagtgactgcaaatatatcatccacacaggtcagtgcaagctccacattcggccagccaatagctccttccagaccatccgcacaggtgggagcatatgcgcagtcattatgcagcgtcttttcatgaaaagaccgcagccaaggtgcggacgcttccgtctgaagtccgtatactttagtctcgggatgttcggctttgcaggcaattgctgttccgcacagcagtcctccccctcccgtaggcactaaaaccgcatcaaaatccttccattcacgaaagcattccagcatgacggtcccctgtccggcaatagtgtccggcgtctcataggcatgaataaattttctgcctgtctcccgcgcaacctcaaaagcttttctctctgcgtcctcaaagtgcggcccgcataccaaaagctgtgctccatatttctcagccttttgccgttttgtcagaggcgcatattccggaacgcatacaatagccgatgtctccatgagctttgccgcataggcgactgccagtgaatgattccccgcagatgccgtcaccacacctctcttaagctcttccgggctcagcttcagcatactgttcagagcaccgcgtatcttgtgggctcctcccatctgcaggttttccatcttaaaccatacttcacttcctaccctccgggatgtaggctccgaatatatcattggagttttgaacacaaaaggctcaatttgttcataagcatcttgaatatctttcatccctacctcaatcatactttacctcctccccaacgccgcccattcgttctttatgagtgaacgacgttctgcatatttgaaattatatcactatgcagcatgttttacaatatttaattaattctatctccattttcgtcaaatagcccaaaatcccagcctgatttttattgaaatagaaaaaggggacgtgtactttttaaaaggtacacgtcccaaaatagatctgccctgtccccaattggtcacagcttagaatatccgaagctgttcaccatggcatctagttttactctgttcctgcataaagggcattccgcgggtttatagctctcataatccggaagatcttttttggtgaaaatagtatttacctccactccggccaccttagctaccgcactgaagacggcagataccccctggataattcctccgtaatatagaatactctctatacttttctggagtgtctttcccgtggtgatagagcctatcagaataactacatttttaccctttaccatcggctgaagattatcccgaaacatcatctgcccattgtaactaaattcaggtgttatcacatatattgtctgatgggcattcatagaatgaattccggcttttgtcagctcctctgcaagaaaagcgccgattacctccagcccgtccagacacacgatggtatctactggtgtgctcagttcatatttctgggccaaagcggatgctacattttccgcctccgcgcagcgggtcttcattgttgtcatatcaaagtaatgggtgatatgtgactgagatgtggcaaaatgtccctgtatcacctttagagcaattgcactgttgcttctggcataaatttttcgtaatctttcttccatagaaaccctccctttccagttgaaaattgcacgaactattcaaataattatgcttttattataccattgatacaacaagaagtccagcaacagaattatgtgcggacaaataaataaaaaagcacagcagcctgctgattcaggcgctgcgcctttttaagttcatttatttagcaagaaaaacgttggcgtatccaactccaaattcgttgcactcgttgtgatcattcataaagatatccacatgtccgtacggagttcctctgtcctcaaccgtaaagagctgtccattaatcaccagcttggtgccgaatggaatacctcccatagccacagtccggccctgcaccggcatagtgccgcttgctgtaggtccgccagcccattgtccgctgcaaagggaacaattacagtatgcggtcagcttaaagttacccagcaaatctcctatctgatccgctgttgctgtggtatattccgatgtggtctgatccgctttggcattcacgagcttaatattctcagaatccgcatctgatatcacccgtgttgcccacactgcatgctctgtatctaccgtagaaatattgattccagtctttctggaacccgcctgtataatctgcccgtcacccatatacattactacatgatataccgttccgttcttagcatagaagataaggtctccgggcgctgcatcctccacaggaatctgtgttccgtacagagcctgttctctggaggttctcggcagagagtagccaaactgtgcatagatactctgtacaaatccggaacagtctgcgccgtttgtaaggctggttcccccccatacataggggtttcctaaaaactgctgggcaaactctaacatggacgtacggattgcacttgcaatcatgccttcctttacagaggttattgtataatagcaggctgcattctcctccggttcaatgagctgagtcgccagtgcaaactgttcttccccagtctcctctaccttcttggaggcttcttctccctgaaggagatattctttcttgacaaatcccctgacatcttcggattccacatagacccaatcctgatcactgtccgcaaggatatagcagagtgcatcctttgccaacgttcccacgatgcgggagtctgtgttcttgccttcccttatattcagctcactggctgtagagatagcgtatactttatctattacagtctggcgaatggtagttcttgtataggttaatgccggattgtcgataggatccacaagtgcctgtgccacatgcagatttgtttcccctttttctgtcacaaaattatctgcctcttcatccataagcagatcttccgcttttacaaaccctctgacaactcctgactctatgtaaacccattcgctgccctcttcctgtttcagcacatagcaaaggccgtctttttcaatctcgcccaccacaatgggatcttcctggggctctacttctgcgttttccccgtcctcagtctccatctcttctccgattttggcagaatagatgtcaagagcttcccttgcaactgcgtaatccttttccaccgtaacaaagcggaaagtatcctcaatcataggaggaataatgatctgctgctgggaaatcaaaccctgattagtgccggcctgaggattggtaatggtctcagaatccgtctcaggagtctcctcctcttccggtgtctcgtcttccccgggagtttcctccggttcttcctcttccggtgtctcaggattctcctccggctgttccggaaggggctcatccggctccggttcctccggcgtaggtacatcaggttcttccggcacgggcgggtccggtgcctcaggatcctcagcaggcggtgttgttgtctcccctgaaccgggattctgtgtctggtcgtcatctccggccggaggtgtaatagttgatcctcctgtatcggaacctggcgttgattgtccactctcaccctcagggtctatattagattcgttatttacattattgtctggcgctgcatatacggccgtcgccggtgtcatcaaaacgccagccaggctggcagcaaagattctgttaagccatactttccttttaaacatccttaagtcctttcctttggttttttactgctccccctgttcgtacattaaaagggggtagtcccggcttttaattatacttaatacgtataatataccattttgtggattggaaatccagagagttaacagatttttcacatttcttcacaatttattttaatgcgaatcccttaaagcatctgtctgcagtctcagaaacgcttcctgttcctgacggtttcttgttatcagttcatgggttaggtactgaggtgaaattctttcgataagcctggacagtccctttcctgtaaacggctggtgtctgtccacctgaaaaatatactcaaatatctggcaccagcgctcccagtaatcctcctttaacttcggtatatggttcctggaagactttacaaattctcctgtaatggactgatgaaggtggattccctttatataggtagaaattccttcattcctgtcgagaatttcgtttatataagcaaccgcctcatcctgatttttcagattaagatttgtattcagcaggtgccctgtatctaacataaagcctttgttcttatagttgacgctgtccagcaaaagcctcggcatagccggatccagaaaattaagtccgggccaccacaggttttccataagaaaatcaaaggtgtatttttttccatctaataaatgatttataattcttgctgcttctattataacttgttgatccgaatagtcaaacttgtatgtaaatgcttcctttattttcacctcacatacatgaaataccacatatttcgccccaatctcctgggcgtaatccaattccttcgtaaacttttcaatcagacttcccggacttgtccctccgtagaactgctctacaatctccatgctgccgaactcttccagcaggcgctttttattccccagccaaaggtccatccagttctggaaggatgacagatgcaccccctggatcatatcctttggaatgtctgcttctcccgggattctcatatattcaatgccgtcgcagccgtactgcgtacagaactgtctgaggtcctccatatcccggaacctttcaagctcatcctgattatttgtcatatttatcgtcgtaatcaagctgtctttatctcctttatgaatggagcgttatctctaacgctccattattttgattattatatcactgcaccattgaaaataccagtgtgtgcgcacgaaaggttaaaaaatgtacgccaaaggcagctattttacccatactcctgagctgtttacgtagtaattcccaacccaggtgtcagctgccatagctccgctgctgtatagatagtaccacttacttccgatcttctgccagccggtctgcatcgctccgcttccgttcagataataccaggtttttccgtctaacagccagccggtttccatggcaccgctttccttcaagtaataccatatgcctccgatcttctgccacccggtctgcatcgctccgcttctgttcagataataccaggtttttccgtctaacagccagccggtttccatggcaccgctttctctcaggtaataccatatgcctccgatcttctgccacccagtctgcatcgctccgctgctgctgctgtaataccaggtatttcctaccttgtaccagccggtctgcatggctccgcttccgttcagataataccacttactgccaaggaatatccagccggtctgcatttttccctgagtgctcatatagtaccaggtagatccaactcttacccagccagtacacatcgccccgctgttgtcacaataataccagccgcctgtagtctgtatccaaccggtgcgcatatagccgtctttgtcaaagacataccattttccatggatctgtgcccactttccggccggccatgtaccgtcgatgtatcggtaccaccagccatgattatttttgatccaggctccgctgtataccacattcactctgcagaccgcggttttcccgccgtcttctgtggtaactgtgatgtctgcttttccttccccttttgccgtaacttttccatttgcatccacagctgctacggaagaattggaagatttccaggataccttcttatttaatgcggtagccggggaaacaactgcctgcaaaactgtcgttccatttttgtccagagtgatctgcgtcttgtccagggttacatctgctactaagagttctgccttggtcataattgcatccatcagagatttcccatcattcagtgctgattcgatctcttccggcgtctgagcggcatcaatggcttctaaccctttttccagaatctctgataattcggttttttgcccttctaaatattcatcaggatttttataactgctcagctcttttttggctgcatttctggaagctcctatttctgtcattcccaccgccagaacattgccggaatccgttttatagtacagggtcccgtctgcacctgaaatgatactggtaatacaatattgctgatactgggatgccgggataaacagttcctctttgataggttctgtctggcctggtttatctttaatcagtgtgattccgccgctcatttcattgtatgtcatatagagataggaatatccgtcaatgccttcgtatgcggtggatagtaatacggagccctgtggataccctttcatgggaactgtatatacggtttccatagtcgctgcatctactaccgccacaccgaattccccgctaaaatttccgcccgtactaaatccggcatagattcttcctttatagaccaccggtgtactggtgctcatactgcctattttgcaggaaaccagcgattcaggatcaaagacgccgtctgctgctacatccatcccatagagataacctgccttggtcgtaaagtatatttttccgtttgcactgtcataggaaaccgttgagcgctgatcgccctctaactccgccgtttctttcacagctcctgtatatttgtccacggcatagagtttcgatttaccgtctgcgagaatatcacttccgaagataagagtatcctcaacggcaactgcccctgcccaatagaatcccttatcgcaagtatacgtccatgccgggacttttgcttcatcagaagcttccggatcctcatcggtgatgggcaggcatacataattggaggctttattaggattccagaatcccgtatatacatagccgtcagagtatgtaatagggctgagtgcctgtccgccataaggatcccggtagatccaaagtgactccagtgtctcggcgttaaacgcctgaacggttccgtttgccaaaggagcaaagagcattccatctgcatatgtaggcggtgtatagccccagtttatcgctgccgccatggaagcggaagcctgctcctcacctgtttttaagtccagtttataaatcttagaattggacattacaatcagcgaatcgtctacaatgatttgtacactgggcgctgccgaccatccgcttcccagggccttcgcccatttcagttctgtctcctggctgtcatgaggagtaagggccggggtaattcccatattgtcttgccctctgcggaaatttgcccattcagagggcaggatggtaagtgtgctctccggtgctttttccagaacaatatctctggtctcatcctgatctgctgtaatcgttcccgtctgtgagatatatcccgtctttacagccgtataggtatattctgccccctgcatcagtgtataaaggctatcctcaccagccactctgctgcctgcgctgtccttcagtgtaaagacagcatcctccggcgacagatttaatgtcatcctgacagaattctttttattgagattcagtttataagtgctgtttacagccccctctgcgcttactttaatcagggccgttgtcgtgtctcctgacagagtcaccacggcattcccctgctcatccacagggaattcgttgaccgtaatctgataatcgcttccatatcccttcaagtggagggttgctttctcgtcagagtcgaggacgtccgcgtcatacgctttggttaatgcctcaaattccggactcagaatcagagaattatgatctgtttcccctgtcagggaggataaggtagcaactctgtctatgataaaggtatatgttatcgtctcctcctgagtggcaacttctaacgtcagcgtaggagaaacaaggccggattttataaaattagtcagtgctttattttctcctgacttcaggacctgggttttatccgcctggttcgaggctgctttccatttcgctgtcattgtggcatccacaccttccggaagttctgcattgatgacaaatgtacttgtaatatccccagccggtacatggtaggtagtaatctgcggatcaaatgccgtatcggggatgagttcattggtgttcctggaatcgctccagaactgcaccttctccagcaatggctgttcctgagttactttcacctggcagactgcctgttgggttccggatatagcagttatctctgcggttccctccgccacggcagtgacctttccatccgttaccgcagcaaccgaatcgtcgctgctggtccagactatagggtctgtagcattggtgggtgaaagctcggcagttaagctgccctcttttcctacgccgagggttaattttgatttgtttaaggtgatttctgttgtcttatttactttctccacaatattcattacagactgcgccgtatagccggaatttgtctctgtcgctgtaatggttacctgtccataagtcttgcagtatacccttcctcttgaatctacggttgcgatattctcatcactggacgaataggtatattttacagaatctgtggagtttgccggtatttttgctacttttggaaattgataatcctttacacaagaataactggtgtaagacccaaacgtaatccccgtcagcggtatttccttcaccgtcactttacaggtttcagtaaagtctcctactttcgccgtaatggtcgtacttccctgtgcgattcctgttaccctgccatatctgttgaccgtagccacctttgcatcatccgtgctccaggttactgtggcatcgtctgtagtattttcgggctctgctttcacggtaagtgtctcaccgctccctttcaggacctccagttctctcttattcagtgaaatcccggtaagaggaatctctgaaactgtcacctggcattcggcagtaaacgctcctacctttgcagtgattgttgtggttccctctcctatagctgtgacttccccgctttcgtccacggctgcaatctcttcattcttactgctccacagcacgtctctgggttctgtggttcctgccggttcgtagctgactttcagttcctgtttttcatgtttaatcatagtgagctcagtcttatccaggctgatgcccgtcatggcctctgccggaacagtaacctcacaggaagctgtaagttctcccagaacagctgtgatagtgaccgtccctgctccttttgccgttacctttcccccttctactgtagctactgattcatcactgctgctccattgaataattccaggagtcgtggttccctccggtcccacagttactttcagctgttttgactgcggataaggcactgtcatagaggtctgatctaatgtaagtgttgtggctgggcttgtctccatcacttttttaagtgtgtcatttgcctggctgacctcttcttttgatgcattcagcgtcattgcagtttctactgctttgtcataggcagcactgattgctgggttggccagcagctgctctttatttacagaactattcaaagccgccatggtgcctgtgagctcgtctttgtctgctgttggatagaaatcgccgtttccaaagccgccgcccatacttccgtttccgcctacatccgccccgtaccagagctggaagtatacccggatggtatctccatcctgaggataagcatcagagaatcctacattgggaaagatattgttcagctgatacatataaccggatccctgagcgaaatcaaattctgaaagtttaccgggatcatcgtgatcgtcaaaccaggtagagcatccttccgcttccatagctgacttcaaatactcaggtaccagctctgtcacatcccccgggatattcatggttttcgctttatccgggtcctgacagcccaaatgaggcgttccgtttgccttttgtgagcacccgtccctcaagtcagagagataaaatccgctttctaattttcctgtatgctcaaaacaatagccttcctcttccagtactctggcgagaagctgtgctccgttttccccttcatagacaggaacctttctgggctctacaaggtaacccatacctatggaacctgcctcaaagctaaagttaatataaccgatcaggccgccttcctctacctttttataggtgacgtgatacgttttctgttctaaaagctgccaggtcagttcgtcacgtacagatacaacaattacattttcaccctccttggtaaagcgaagcgtaaaacttgttttttctgtatctgaccatgttttgtttactgtggcaccgttaagggttacttgaggctctacttttttaccgtcctcatcataagcccatacatcaaatgttgtccggctgcccctgtatactgtgccgtccgtcaggttggttctgaggatttcccgggcactgctgctctgggcatccaggccgtaggcggctgcccgattctgcggctgtgcctgtgtgctttcttcttcctccggtacaggctcttcctctgcctccgtgacagtcagggtacaccatggagaaaataccggataagtcatttcatccgtagtccttgcagatactgtgtatttacctgcctcaggcgctgtaaaggtaacctgaccattctcgtctgtaacggcattctctatatctgtgctcacaccattctcatctatcagctgaatctgtgccccttgaatcggcagaatctgctgctgttcacttcccgcttcgtacaatcctgtatacgccagcatatatccctctaatgtcagggacaccggcccggctgcttctgcggttatctcttccgttttttcaccgtcagcagcaaaccagccataataatctccggaagtcacttcatcctggaaaatcacaaattctaccacatcattttctgacagcacggcttcattgattacaagccctgcatacgaaccgtcctctcccagttccccattgtgggccggataaccgtttacgagaaatcctgcatattttgtatcttttgcataaatcctggtaatccatccttctgcattgatctgaagatagttctctgcagtctctttggtaaattcgtctccgtacagctgggtatgaagataaaccaatgcatccagtgcagtaatctgtcccttttccaccgtatcggcattggcatagccatactcttttgcaataccctctgggatagtaacactgtttctcaaaaatatgtactgatttcccccctgtgccgaaaggatgatggtgctttgagtcatatcatcttctccactctcattttctgcatcaggatccgttccgggttctgtttgggatcccccgccgtaaactgtactgtctgcctctgcagccattactgcagactcaggtacaaggctcagtaccataagaaccgtcaacatccaggcaaatattcttgtctttattgttcttttcgcctttttcattgtatcctccttttctgttgggtagtatattgtatttccatctatataaaacgcatctgcggcgttaataaagggattttatccagtacatctggaatcttttccatatatttttgtctttttttattgttgtcagagtctgatcgaggtattgttctacggtctgtctctcttccaaagcaatctccttttcactgtaggcagccttctggctgattcttattacttccggaaaaccggcggcatactctttggaatagacagtttccagttccggcagataccggtaatgagagcctccccttttagggatatccgtatgctgcagcagatataagatataactatacatgctgcagacagctgccctgttatcggtgcttaggaattttgcctttcgctttgccagcagccatctccggtacatcaaacaggcaagcattaatataagaagagctatcacaactccaatcagtatactgagagctatcgcccatggagattgctgctgagcttccttctgcctttcatcctcaggggggtcctctttctcatcggcatccttggtgtcaccggtgtttccttccccttccattcctttgtcaccctcctgggagccagaaaaaagtgcaaaattaggtcgttccattttcgtgagatagtccggagtaacctccatgggtatccatcctatcccatcctgataaatttccacccacgcatgggcttcttttcccgtaattgtaatcggtacagattcttctgcctcctccaccaggtccggtgtgagaaggtagccttccacatatctggccggtattcccagataacggtacatcatagctgctgccgtagcatagtgaaccgagtatcccttttgggtatcccttagaaaatagctcaaaaagtctcttcccgcaggaggcgctgatacggtttcatcataggtaatcttctcatttagatatcccataatcagttcatttgcctcctcatagggagtatgactgatgccgtcttcgctgtctccggtatattcttctactccaaggcaggcttttaaaacatcctttcctttatccggcaccttcgtataggtatcatacacgaactgattgtaataactttcatcttttttataggtagtgatctgctgtcccatctcatctgtcagcttataaatatcctgcaccagctgaggataaatacgcaccagatttaccgatgtctgatattcatagtaccggtttcccccggcgttctcccctcttatgtttacatcgccccagacttgtgcatcctcaagctgtgacggttttgtctgcaattcatagggaacataaagatatttgctgctggcgtttttattcagcactttcatactgatggactccacttccccggtttccagcccatacacctgactcagctggttcatcgcctgaaatccgtctttattcagccagtaaaataaatccctttctttataatacgtatccggctctagatcctcccatttttcctctgtgtattcacttcccacataccccctcaaatacagggacataggtttactctgcacaacctccaacgccggggtgtctttcagttccagcggctgaagttttctgaagttacctttgggtagattatttgtcttcgatttttcgtatcggatatcctctatttttcctgttatccaccccgctgcatgacgcactctgtcacttctgctatatccccccgaggaagctgccgcgcccagaatacccaaaaaaatcagcgtgattcccagtaaaattggtatcatctgaagtaccatcccgtatctgtggcctccccttgtcgcttctgctctgcgcccgtttacatggattctggcaaataccagtgccacagacaataaaagcagaaccgtagccggcgcctgaggagatatccccaccacaaggtttaagaccagaaggggtgcacagaccagcagcataagcagccagcttcttactctgactgctgcataactgatatatgcggctacgatggaaatcagcccccagcacaggatatagcataaaagatattgagatttttccacagatatctcataaagcttcatctccagatgggtatgggttccaaatgcttctgcaacttgattcatagttaaaaacagcccgttgatcagtgtcttctgccttaaaatcagcaggagaaacccaaccgccaacataatccctgagacaaacagggcatactttctcttatttccaaaggaaaaaagcagcagcaaaagtaccagaccggccagtgcggataccattgcaccggccggaatctgaaacatagaaaaaagactgataattattcctgcaaacaggaaaacacagacgcttatgtccccggcatattctgtccaaagatccttttttttcaatttatccgggagaaatactacgtttatctttgtttttctctttttcgcgttttcttttcggtttttcatgataattcctttcaagtcctgtcttttccttatataaacagctgacacaggctttcctctgcatgctcaggagtaaaaagaattctttgtttctccggcatggaaactgcatcttctgtctttgccactgcccgcagttctgttgcgatacagaaacttcccacttcctctatctccgcagtatctctgaatgtaacatagactatatgggaaaaaggatattcctggcttacctgagtataatagtgaagaccggaatacccattgtcctccactcccactccgagaagtcctcccaaaagaccggcgagatcatccacactatttacttcttcgcagaaaaatcctcctcttatgtggtcataccaccccagggtgtgcatatgtccttcttctataagggactgtgagacggatacaaaagcttctatcataccatccactacggaaggtctggggcgtttcccctcctccatacagttctccataaatatgagaatggaattctctacaggcatacttaattcttttacatacagttcatccattttacctgaaagcttccagtgtatatttttcaggctgtccccgggaatatattcccttacatcgaatatctcgctgggatcatagccccgttttgtgtcagagtatgtaacactctccatatcctcgatctgactgtccatgaccctgatatccgactgaaacatatccggaagaacggccacctgctcttggacctctgtagaaacaggagcggaaaagatcccaaaccagtcaaaaaccctggcatcttttatgcggatcctgatacatccacagtaagcactgtctgcctcccagtctatctcttctgtttttccccccataatagagaaataaagctctgcttcctgttcttccctggtcatacagttataaaaagtaagaacgcatcgaactctggcggcaggaaatagagaagtatttttgacagccaatactccttttgccggttttccttttgctgcggtatgctggacttttagttcaaaggacagcttttttttcgtcaggactgtcagtatcttacagacagcaaacaccgccagggacgtaatcagcaggcagagagcaaggaaggagtctgagaaaaggaaaaaatagatacagcccaggagccagaggatactgtaaatcttagcttttatcataatctgtctattctcctatcttcggtgtctcgatctcctctgtaatctgcttcattatgctttctgcagtcgtatttgtaatcttagccttaggaaataacaccaccctgtgtgcgcatacgtccggaaatacacggataatatcttcgggaatcatatagtcacggccttccatataggcagacgcctttgccatacggtttacagccagagcgccccgggggctcacccctatctgtaccagttcatgttcccttgtcgcctcggcgagacaagtgatatactccagcaacgcatcgtcaacatgtacctgctgcacctctgcctgcatttccataatctcctctttagttactgcctgctgtgctgcgtccagaggctgttctgtctggcgatcccgtagaatatttacctggcttttaaaatcaggataccccatctgcattctcaccataaaacggtccagctgggactggggcagcagctgggtgccggccgaacctatagggttctgtgtggataaaacaataaatggctgtggtacctgataggtattgccgtccactgtcacatttccctcttccattacctccaggagcgcggcctgggttttgctggaagtccggttgatttcgtctgctaacagcaggttgcacataacggctcccggtttataggccagctgcccggttgctttgtcatatacgctgaatcctacaacatccgagggaatcacatcaggagtaaactgaattctcttataatccagtcccagagcccgggagaatgccagggccaaagtggtcttccccaccccaggaatatcttccagaagaatatgcccttttgcaagtactgtcatcaggactttctgaataatgtcatccttacctacaataacttttttcacttcgtcaatcattcttgtaatcttttcttccatgtctgtctccttctgttatataccgtatttaatttttattctctctatgcgggtgccgataggctttgctgcaatgagcagaaagactatattagaaactatgtatatcactgttgtgggaatccccgtccccagcagtaccagatatctgagaaggttaaacgtaccgtccagatttaatgtggaccaaacatccataagcatagaatacagcacaccggctgctgctccgtagacaacaatgggcagacggcttgccaatgtttccccctgcacagaagatttaagaatcttctgcaggacgggcagccctgcaataaagcccaaaatcccccaggaaaacatctggaagggagtccaagggccctgtccgaaaaacatatttgagattacggccgtgagtgcacctgtaaaaaatccggcttctgatcccaggtagattcccgtaacgaccacgattgctgtgacaggcttaaaactgggaacgggagagaataaaacccttcctaccgaagcgattgccaccatcaccgcgattacaaccatacggcgggtatctgcttttcctttttcaaaaaataaaagattaggaacgcaggccagcagggcaactgcaatggatattatgttatatttgcgtcccttaaaaagaacaacgcctatggccagtgtaattggaatgagaataattacgatggcaaagcttcctatttttttccaattcatattgatttcctcccgtatttcctgcacagtgccaccacatcctcacaggtaatggcgtagggatacatatgcctggccatccggtttgccgctgttgtataaaaattgttattggaaaagaagctgaccggcgtatcctgggaaatcacctctctgtcaaagaacagagagcaccggtcagagatctgggctgcaaattccacatcatgggttaccaaaagtatggtgatcccttcttttctcagattatccaggatacctcttagtactgccttggaatatgcgtctattccctttgtgggctcatctaaaagcagacatctgggtttcagcagcagcatcttcccaagggctgccttctgctgttccccgccgctgaggtcataggggtgcttaggaagcagctcctgtatatttaactgccctgcgatccggtcgatatcttcctctaattcctctttgccatatcccattactttaccaatctctttatagtcctctgccacagatgtttttagaaatactgtctgagggttctggggaagcagtgccagattatgccggtataactctccgctcttgtattcctttatttttttaccaaagatcttgattcctccccggtaagctttattctgtccggatattacgcttagcagtgttgttttacctgaaccgtttcctcccaggatactgaatatctcaccttttctcactttcagatccactcctgccagaatatcaggcaaggccctctcgtatcgaaaccagatattcttcaggtgcactgccagctccccttctttttcccggtttcccacagctttctcacgctccgggctctggatgctgctctcctcctgataatttcttgtgagaaaatctcttccctcacggatggtcagaggacagtcatcccgggcgtccagctgctgatagatccgcataggactgggcagtccaagaagcataggatggttctgatacttctcctttaattcactaccgattatcctgggtgtatcgtacagcagcagacggcccctatccataacagctactttatctgcaattggaaaaacttcttccagcctgtgctccacaagcaggatggtaagcccaagctcccggttcagcttatgcagcgtattgataaaatctgccgccgcaatgggatccagctgggaggtgggttcgtcaaggatcagaatccttggctgcatcaccataatggaggcaagattcaaaagctgtttttgcccgcctgaaagctggctggtttctttctgaaaccactcatggattccaaaaaagctggccatctctcctacccttcttctaatctcaggagtgggaacccccatattttccagcccaaaagctaattcgtgccacactttatccgttactgcctgattctcaggattctgcatgacataccctatctcgcaggcagcggttctgtcattcagctcaccaagccgggttcccatgtaatagatctccccttccaaggttccattgggagacagctctcttttcagcaattttaacagggtggtctttccgcacccggactcaccacatattactacaaactcccccggaaggatcttgaaagacacagagtccactgccctcttctcctgtccggggtatgtaaaactcaaatcttcgctcttaataatttccactgtatacgcccctttatctctagtattgatggaaacagcatcatcacaagtattatgctgtactgcagatatgctccggcccctgttggaatgggagatacgcttggataatagtagaattcaaatacattctgctgatatcccacgcctaacatacacaaaaatgcacccagggctgccagaagaatcccatcatccattcgaaaacaaaaaatagaaaaattagtccttcctttcagcccataccctctggctttcatagagtctgccgtctctatggaattctccagacaccaggtaagcagggcacttaaggtacggatactgctgatcacacgatctgtcagactgtcgctggtataaagacccatggttttttgtacctgactgattttcttcatctgggatttaaacacaggaataaatctaagggccatggacagaaccagagacagcttaggaatggcctttccgaataaatagacaaatttatcagaggtcatcacctgattgtagcatttgcaccagaacataattcctatcagcattacagagaccccggcaccatacaggatagcctccagggtcacaggattgtcattcataaaaaagagaggcgtctcccctctgtgattgaagatagggtttgtcagggcaaggaggaaaaacaaaaagagataaaagataagatttttccccagcgctttcaagggattcattgccgcaaaaaacagaataccgcccagcagtgaacaaacaagcaataccggatgtactgtaaacatcgtcagcagaagtacgatcacataatataccagcaaaaccgacgggtgataagatgaaaaatgatccatatgcccactcctttctattgctcaaattctccgcctacatccctgcccaaatcgcaggtatagacaaattcaattacatctttgtcttccggcttatatctgctgcagccataatcagggaattctccattcaccttatacatccagcccgacaggggtccgcaggaatattcatagagatggtgaattcccttaatatatacgctgttgtaaacattgtcatctgctccctgaaattccatctgaatcttgctgtgccgcaccgcccgattcaggatatcaaacacggtatccttcgggcggagcacatattctgtaggcggcaagatcacaccgtcctccggaatatatttgtcactctgaagctgaggtgacaattgttcccaatgctccaggacagtatcacaccgaatactgagtgtcactgtctcggaatcctctttgatgtcgtcgatgtgtgtctggtaatagtcctctacagactggaacttcgtgccggatagaaggactgccacaattactatcacaaagcccaatacaagcaagtctttcttcaatgcttaatcctcccaatcctcctcatcgtcctctgccggcatcattttttcagccagcttctgacgcttccgttttttcatatgtaatacaacaaatataattaaaataactgccagaatccccagtacagccccaagccataccgctgttgtcctattcctgatcatggtttccgctctttgaatatcctcatactgctgtatctgcttctgatcgtattcactcagctttttgcagcgggccacaatactctttaccgtctctttctcttttaaagagattctgtccaccggataaagtttatcgattacctcttgattaattgcatcaatttcttcctgtatggcttctatctccgcctttttcttttccaggatctctttttcttctgcgtaggcatctttattttctgacttattccatttatccagaagagacaccacaagagtataggactctgtggttatggaatcaggcagttccgccactttttttgcgtcttcggaagaaaatggcacattaacagaaaactccatagcctctccaaacagtgtccccacagttccgctgccgctggtattcagattcatggctgcactcaaagattctgaggtattttgtatcccctgtgcctccatagcatctgccagcttatggtaggaatagacatagcatctctcttctgggggaatctgcagatatttatcaaaaatcccctggatcttttctctgtccccggctcccggttccacaggaagttctgctatctctttctgtacctgagcgatctgactcttcacttcgctgctctgctccggccggaagtcgtagagtgaccgcattcccccgtagtatctgcagagggcagtcagggcatagagggcctgctgacttgccatatcgttagacttcgtaggatctgctgtcggattattgggatctgcctcttttgagtgaataaatcctccgtcctccaaacgatatttcatcagtccgtctacaagggtattgccgtttttaataaaacgttcatcctccgccgggttaatgcccagactgcagagggccacgattacctgtgagacactttcagagtttggggaaccccagctgctatagtccccctcatctgactgctcctgggacagcagcgccagactgtcgtccacggcctggcggacggttctggtctcttcttctttggttacatttcgtgtatatgtataagtttgttcactgttataatagggtgccagagcctggactgccattcctgtaatatccacatcagcttcaacggcgtcaggtatcagagaaaatcctccattttctttttgttgagacagcaaatattttacaattccgtctctggtatctgtggcatcctccggtatcacatatctcagactatccatctggataagtccccaaatcattccgttaatcccttgatttcccagcgaagttgtctttcctctataataagaaccatctgctataagatttacgtggtttccatctccgtccgtacctatatctgtaggatctcctcccaaggaaagtaccgctaggctgattctgtgccattccgttgcctttgaacggtctagtgtaccgtgtttcgtatatttttttgtaatctgatcacccagcaccgccaagtatgctgaataatcatcgggatatccgcttcttccaatccctactggaaaccaatcagccgccgtggttccggcaccttctgcaaaagcagtttgaaaaagattctcatcctttgaataacccatagctgacttcttccattctataataccttccatgatttctaggaattcctcacctgtatagctcttatgggtaccctgggccatgaccggagctgctcctccggtcatgagtatgacagctgtaaggagatacgccaaaagctgtgtccagcgttttattcttctgttcttcattgccgctcttaatctccttcccttaccagcccggagaccagttgctggtgtcaccacccggatctttgcccatagcatctccggcaccaatatctttgccgtaatatagtgtaaagcgtacgcctacttcatcgccatcctgcagtacccagtcgctcatagacaaattaggataatgtccgtttacatgatacatccagcctgaaccctgagagaagtcaaactctccaagactatccgaatagtaatctcccggccagttttcttctcctactctttcaatcactaaagcagccaaatcagccggtatgcgatcaggcgacaaccctgacaatgcacctcccgaaattcttgccagataaaaaccgtcttttcctgtatcttcagcctcatatccatacttatccagcaacgccatcactgcctccgcgactgtcataccttcttttaactctatatcctcatcaatcaaaggtgtattaatacccacagtctttgcatccattgttatatgtgccattcccagaacagggtcattcgtcccttcatagtaaacagtacagcgtttttttgttgttctgccttcatcatctgtcgccgatatcaaaataatattatccgtaccatccgtatggagctgaacagcaaaccccacctccttgccatctttccatttataacttacaccatctgttctgccgttaagataaacttctatattatcaggaatatacttaccattaatgtcttttgcaattacactaaaagataatgtgggctgtttggtatggtagatgagatcaaggccgcttaataatatatcaggccccttgggatctccttcatcaccgggctcccgctctctttcatatgtaactgtcacaacctcttttcccgaggccggccatattgtcaccggatcatgctcggaatcccaggccttgatccgaaaggtgttttcgcctatttctaattttgcagtataacttccatcttcatttggctcaatcacttcatctatgtttgattgtagtatttcgagatttactttactttcatccccatcaattgatgcacgagcataaaaagtaatatattcctcctctgtgacggtatcattaaaatcagattctatttcaatttccatattcttagctttttgatatcttacggaatattttacattatccacagtttctccattgaaagagccgcccaatataatttcattttctccctctgaaagagtaactgagtattcataattctctgtggatgacggtttaacttcctttccatttaaagttactttcgcctgatattgtctgccctctttttccaaaactgcaataaatgtaagatgaggttctgttacaaccttctcgttttccccagagaattgcgttcccagagtttcttttagaattaatcggtttgtaacctctacttctttggattcctccccggagcatgacgtcccgtcgggctttgtatagtaaaccttagttaaaatagtatttactttattccattctaactccagttcatatatacccgtctctttattgtgttttgcatctttttctttaccattgacagtgaattctatttttctaactttataatcttccttaaaatgtttaatcgtaaaatcgactctgtttattgacagcgtattatgcggatcaatagatgtctcaaatagtgctccttccttccctgtatcatcttttgttctattatctccattaggattttccccatcaccgtcatcagtaccacttgatcctccgttatttccatttttaatgtcatccccttcctctcccccctgcggtgacgcgtcatcattttctttgtcctgtccgtctgccagtccttcagggtactgaggaatcacctcatttgtggaattcaaaggtactgccgaatgctctgtctctgcctcacccatagggttatccggtaatgcttccggctgcatgccaagtgccgccaccgaaggtataattaaacaaataatagcaaatacagttatccctctggaaatccactttttgctcttactattttctaaaaatctccgcaatctttccatactctacctctaatggattttggctgatcaaaaattgatcagccattctccttttcctatcgtgatttggcccatactccagagccattaacatatgagtttccgacccaggtattgctggccatagcgccgctgccgttaaagtaataccaacttccgccgatcttctgccagcctgtcagcatcgccccgcttccattcatgtaataccatttcccccctataaactgccagcctgtcagcatcgccccgcttccattaaaataataccaggttcccccaagccgctgccaatttgtcagcattactccacttccatccatgtagtaccagctgccgccaattttctgccagtttgtcagcatcgctccgcttccgttaaggtagtaccactttcctcctagtaactgccagcctgtcagcatcgctccgcttccgttaaggtaataccactttcctccgattttctgccaattcgtcagcatggccccgcttccgttaaagtagtaccactttcctccgattttctgccagttcgtcagcatggccccgcttccgtttagataataccaggtatttcctaattttagccacccggtaaccattgctccgctgtcagacatatagtaccagcttgctcctactttctgccatcctgtcttcatcgcgccgtcgctgcccaggtaataccactttccgctggtgtaaagccagcctgttttcatatatccattaacgtcaaaatagtaatattgccctgagaccagtgaccatccactttttggataattgccatcgctgtatcgataccaccagcctttgccgtcttttatccatttaccgctataagataccgtaaccttacaagtcgcagtctttccttctgctgctgttgtgacagtaattactgcagttccctgagacactgcagttactcttccgtttccgtcaacgcttgctaccaaagaattggatgatttccatttaacatttttattttctgccgtagagggaagaactgtagcttttaaactggtggatgaatttttatccagggtaatctgcgtgcgatctaaagatacttttgaaggaagcagcgctgcctttaattcctctagttttttctgcatttctgagaagcgcgtcatagccacagtctcattattcatccatcgtttttgctcttccgacagtccattgatagaagtcataatggattcaatctgagaacgatttgacaaagtaatattttcggcattctgcccaatataagaccataactcgttaatctgagatacaagtgaatccacaggtcttttggcctcatatattctggtcagttctgcttctgcctttaaaagcacatcataattggtaacttcctttttctgttcctctgttaatgcgtcataggcttttctggccgaattaatgtaaataaccttatccaaatctactgtgccaatattgtcaatcagtgtaatggtatttgatatagccacatattggctgagaatctcttccaactctttttctttctgaaacagcagctctgaattttcctgtcctaccagcactttttcttgatctgttaatctatcatattcagctctggcttcgtaaactgcatctttgctgtcctgagtcactttgccaatattttgtatcattttgattacattttctactttactctgtgaagcctttaaatcggcgatctgttgttctgcctccatcagcttactataatttgttaccatttttttctgtttgccgctcaaagacagatactgttgtcttacggcttctatctggcttgccttagataattcaacttctcctattgcctctatggcatcaatcactgactgggctgctttcaaatctccttcattttcaatctgattaagaatctcaaaatataaagcttcactgtctgaaagcaatgtcacatcttccgctggtacaaatgctttttcttccgctgataatgcatcatatgcatatctggctttttcgattgcttcctgactgtcagccgtcactgttccaatggctaaaatcaatgcagatacagtttctgcagcttccttagatttcttaatttcattcagctgagtttccgccataactaaagaataatagttttccaccatcgctttagcagttactgttaaatcttccgataacagtgcagagcgggtctggataatcaaagcctccctgtctaatgacaccggacctatggcagtgatcatacccataatctcatttgcagcggcccagtcattgtccccttgctgttcttcagcctgatctttgatcctatttaatacttcattcagataatcaatctcctcttgagttatcttttccgtctgggtttcatccagaagaagataagatgcttttgcctgcccggcttgttcccaactgtccacccctacattttctaaggatgctatcatatcttttacattctgaaccttttgccggcccgcctccagttctctcaactgtgcctctgcctctaacagaatgtcataattagaaatttccttcttctgaagataggataaggcctcatatgcctcccttacttcaacaactgcctctttactgtcttcggtaatttcccctagtgcattaatggcacttacaatattgtctacattttcctgtgctgtctctaacgcagataattcctcttctgcgtctacaagtatctggtaggtttcactgttaataagatttctttgctctgtactcagcgcattgtaagcggcccttgctgtctctatagcagctttactctctaagtcaaccccgccgattgcctgaatcaacccaataacttcatcagcagcctgatgcgcatcttttaatgctgctaattctctttctgcctgcactaatacctgataattattcaccaaatctcttgcctcttttggcaatttgatatattcatttcttgcgtttatgatagtggactccatatccagagtaatagggctttctatttcccgaataagttctatgacaatatctacaccttgctgcagttcttctaaacgtgcaagttcagcctccgcattaagtaacttattatatgcaatattgcctacctcatccttctgattctgctccataccctcatataggccccgggcatcttcgatgctcttcttgtcagccagagttattacatcccatttattaactaatccataaaatttagttataggtgtccagtcagtcagccattttgcataaaaattcttatctccgtagcttcctttctctatctgcacaacaggactgccctttagcgctttattgtcataccaaccctcaaatgtatatccccttctggatatatcctctgctgtgggaagagtgaaactatccgtgcttggacgataaactgacggcagttcaatactatcatccaatatacctccatttagttcccattgaatcatatattctggtttgccgtactgagcataaagggtaatatctttttctggcatggaaagaagttcatttggcatataactagtgcctgttccatctggttctgtattccatcccacaagttccatttcaccatttacaggggtggttggcagttcaataacagaatatggcgattgttccttgttaaaagtatctgtatatgaattgccgtcaaaagtaaccttgtaattctttgcatcattccacaggtaattattctcagttgaatctcccatgtcatacaatgatgtttcccccgtaagatatctgtcataagccgtcaaagcataaactgcctgatcggtagccatagcattaacctttgttccagagccgcctcctccatcatatccaaatgtcacatgcttaaatcccccaacttccggagaggatccggttccggccgcccaaaaggccagcagtgcatcaatcatattattactgtacacgccatctactgcagcccccttggttataaaactgcagttctttcctatggaagttaagtttacgttttcagccttaggatcgatattcaaggaggtcaacgcaactataacctgagcaatactctctgcattaatacttccccagctgtcaaatccgccattttcttcctgtaattgagagagtatatagactcctctttcaacggcctctctcatctgttcataatttttttcagcacctgtttcatcgtataaatctttattgttataatagggagctaacgcctgaagcgccatgcctgttatatcaacatccggataattattatataaagcccatcctcctcttgtgccgttactctgaattatttcatcatttaatatgtaatcaatcatttttcctgtcgtattataatctttaggatctccccctgatggcttcgaatataaataatatttgccagtctgtgccgtacctgtatttaatgcaataatttcccaaataggaccattgatgccttgtttatgtgaataagcataggattttgataattcatctataaaatcgtatttattttctcgctcgctaacatagcccacgcttgtgatatcataccccatggcagacatagcaagaattaatcggctgtactctgtacatttagaccgatctaatcttcctattgatgatattttctcatccacatattgctccatacgatagatgtaatcagtaaagtagttggcatcaacataattcagataatccattcctgtatattttgcccgaagcaaatccataacagaccattccccataggtactgcctacagatggttctgttactgtctccaaaatatatctcagtccagcattcatatagaatctgattcccggctcttcgtcctcccagaaccgaagtttcagatccttataatcctcccgtggatcccaggctgccgcagatattgttcttgggtttatcacacaggaacttacaatcattacaactgcaagcacgattgatatgatacgcttatatactcctctctttttctccctcatactcttctcctttcatttttcatacagcagtgtcattctgcgaatcatcaataaactccattttaaatccatattccttaccgtattcttcaaccgcagatccttttctgcaccttatggttgcactcctgttaatgatccattcaccaatgaaaatgggatcgtgaagtatctcaacaactttcaggcggttgcagccgtggaaaacccactttcctattttttttacactggacggtatagaaacttctgtgagattattacatttaaaaaatgctgcctctcccagttctctcagctgattcggcagtattagtttctgaatccctgtaaagtagaaagcctctgagtctattattttaaggctttggggaaaatgaagttcctgaagctctttgcatcggtaaaaggctcttctgccgattaactgtatttcgtccggcagcacaacctgagacagacgcccgcagcagtcaaacattccctctggtattgctctgcactttgagccccgggcgaattcagcccggtagagttttttacattccttataaacatttttatcaatctttgccaccgaaggcggtatatgtacccgtcgcagccggttattcctggaaaatgccctttgtctaatccacaaaagggtattcggatatttcacttccttttgaaagcagcagccctcaaaagcactttttccaattacaatgcaccccctgggaagcgtaactgaattaattctctcgtttcccataaacgcttcatttccgataaaacgataagtatctggtatcacaatgtctttatccatattcctttttgcctgatacttcgtataagtacgttcatcatattgcaggtctctccatgcagcctcatccagtttctttttcataatcctccacctttatctatctattttttcatatggacaaacctcctatacgcattttccgcacaaaaataagagcttcgccttgcctacgaaccctttcctccacacaatgcgtccaatatcctgactcaagttcctcctactgacagcgccttcccaaattatcatttcagtggccaatgctgcgttcgtcccttttacagtagagatagactgtttcggattctcaccgaattcctgataaacgccgataaatcttcggcagaccgcatctggttgttcatttttaaaagatgttttctaaaatataaaaaatctccccagcaaataaactgagaagattatagacaatacctttttcttttcgctacacaacaatcacaagctgcgttattgcttctggcttagatagtattatccatacagagtcctcagaacgcgtcagaatctcactgacttactttcaaactgtcatatccgtatatgacagaccgcaacttttatttacttttatttttagttatttcaataataattgttaagattagaataataaatttataacaaattgtcaatagctatggcccaaatgaatgtcatttatttttcaattttcatcctcataaaatttgtatactatttcattacctattataaacattaaaacagggtgttttcttctttcagaaaacaccccatgacttaacgcgggccaggttccgtcactgtaacggtaccaccagcctctgctgttgcttttccaggctccttgataagtaactgtcactttgcacacagccgttatattaccgttttctgctattaccgtaatgttagccgtaccttcttctcctgccgtgacctttccatttttatctacagatgccactttgggattagaggaactccaaaccacatttttgttgaatgcagtctcaggaaaaatctcagcctttaatgtcacagaccccttcttattcagaacaacactcgtccgatccagaacaatcttctgtatagtttcttcctgactcatttgctcatccgtcttgatggcatctattacttctttggccgcttttacagcagcatgcacaccggttatctccgatgctttatcaatagcctggtttcccgcctcaattgcttttgccaattcttctctctgagcatccctgtagtcggccggatttttataattttccagctgagttttggcactggacttagcctcagccaactccctgtcattcatctgctgatctgtctctatctggtctatcaccttcatagcatttttcagagctgtatcaccccccaatgcgtcctcagccgcatctatagcagcttctcctgcctctaatggcctcttttagctccttctgctgggcagtacgataatcttctggagctttgtaactgcttaatgattgttttgcctcttttttgactgtgtctaatgtgagtttctcttccagcctttttatcttttcttccgcacttgccagcttctgaaggattgtattatctacacgattctgctgttcctgaatcatggagatatataatgttctggcagcacttactgtctctttatcttccagggtaagttcttctattacccacccgcgaactgtatctgataattgcgcaaccggagtttcatccagattccacttggcataatattttttattctctgtacttccggtggtaatctgcgttactttctgtccctccagattctcgttgtcaaaccagccgtcaaatatatacactttgcggatgatctgactgctgtcaggaagcaggatatcgctgtcaccagaggtataagattccggtacatcatatcccaccaggcttcccccgttggtttgcagatcaatggtatagctttccgtatactgcgcataaagcgttatattatgttcaggcatggataacacttctcctgccttataagatgtaccgtctccatccggacttgtattccaacttgcaaacgcttttccagatgcatagctaaagcctgtaacgacatacctgtcatatcaggatccggagtcttgccactcagcgcccagcctccctttactcctgcattggtggtgatttcctgtctcagtatttcatcaatcatcttccccttcgtattataatcctcaggggtaccctctgaaggagaatcatataaagaatagtcaccggtattcagagcaatgagctcccacacgggaccgtttagtccctgccgaaccgcatacttataagactgggaaagcttatcgataaaatcatacccggccacattggacacgttatagccaagtgcagtcaaggaaagaaatacacgactgtattccgtactttttttatcatgcaggattccttcacaatcaacagtatatgtctccactttctcaatatactgatcgaaatacccctctggtatgtaattcatataatcgcttcctgtgtacatccctcaagcagatccataacagaccattctcctccggaagttccaaacgtgggttccggcactgtctcaagaatataccgggctgcagcattcaaatagaatcctatgtccggggattcatcttcccaaaaccgaatatccatctctttgggcgcatctcctttggaatcccacgcctcagcagatacgttggccggaaagctgccgaattaaagcataactactaatatccaggcgcaaaaacgtcttccatgtctttgattcttcgttctttttctcgtcctccttttcttttatgcataaaaagaaaagctctgtctttactaacagatgcttttttcacgcagtatgccagatatcctgacttgagttcttcctaccagcagcaccttcccggatagttccagtggttttacgctgctttcgtccctcacacagtagagaaaggctgttccggattctcaccggattccctgtaaactgactcattgctgagcacagaccataccgtttattctttttactttactgcctaattataccaattggttaaaaacattccacatttcattgtacttcttttaaaaaatcttatccccttttaatatttctgaaatggataagcctcataaaaagccagagcttgttctggggaacatcccaggcttaaatctaactgtgcttcaatggttccatcccatatatcagttacaagcccatacgtcccgccctccttctcccccgtaaacagataatatttgcacgcatccttctcttcagaggaagtactgggatatatccctattttctccagattgcccgctcccattgctcctgtatatattactttataatagccctgattctgaagatccgactttgtttcttctactgtagatacgtctgtgagtatcaaataaatccctgccgtaagtataattcccgcataacacaagcttaccagaaatgagagcttaacagccatgaagtaacgcagatactttttccctgctgcatatataccaacagaacatacaaacggtatggcaaagtatcctttcatatcatgaggatttgtaatcatattcctcgcccagctcaccgtccataacataatcactatagcgctaataatggaaaatattttaagttctggtatctccgctccttctgccgtaagcttttcctgcgctcttttttcttttgtatagaagaagccatatacaggaggtatggctgcaatccacaccagaccggtttcaacagctcctccgaacctaaaattagtgatataaaacaaaagtagtactgttatcacatatataataaatgctgttattgtgccctttttttctttcaccttcatgtccttaaatacttgtttctgcccaaaagcaaaacattttcctttccatctattttcagatagtatcaccttctgccagccacttttggggaatccggcaataccatatgtcttcattgggctcaaatggtacaggatgtcctttctctttatggtaaaatcctttgcgaaaccctttttctataattctaccataaggctggctaaaatgtcttagattatttacacatatatttttattttttgtatgactttttttgttcttatccgtatatctatttaagaaaaagagaggtcgccctctctttttcatgttagctgtctgtctatcttgtcttcgtccatactcctgacttgtttacatagtacctgcctacccacgaatcagaagccattttcccgcttttctgaagataataccacttaccggacagttggagccagccgatggccattgccccgctctctctcagatagtaccaggttccccctattttctgccagccggttagcatcgctccgcttccattgctgtaataccaggtacttccaaccttataccagccagtctgcatcgctccgcttccattcagatagtaccatttacccgaaagctggatccagccagtggccattgccccgctctctctcagatagtaccaggttcctcctattttctgccagccggtcagcattgctccgcttccattgctgtaataccaggtattacccaccttataccagccggtcagcatccgaccgcttccattcaggtagtaccaggtatttccctgcttcagccatccggtagacatcaggctgtcatttttcagataataccacacaccgtcaatcttctgccagccaataagagccgaaccctctgttgtatggtaagaccatcttccacccagagatacccagccggttttcatatatccagccccatcaaaggcataatatcctcttcctatcttcatccggcagttcgagagccatgagccgtcattatacccataccaccagccttttccatcctttttccaggttccgccaaagtcaactgtcactttacattctgccgtttttccaccgtcattggaagtaaccgaaatcacagcagttccctctttgccggaagtaaccataccagtttgatctacggaagccaccgcagggttagaagaactccagcttaccactttatccaaagctgtatccggagttattactgctttcagccgggtacttcctcccttacctaaggaaaggtttgtatgattcaatgctacttcacttacaagctcttctggtttcagagaattaatataatagataaccggttctttctctgcttcctgcacaatcacccgaataattccttcccggggcatggattcaaaagttctgcttgttcccctctgattattgatgtagacattggcatctaccggagcgtccacagctacagttaccttctgctcctctacttttaccttataggagttgactccctcctgcattgctaaagcctctccgtttaccgtgatactggcaggtgcattcgtctttcctacttctttgtcttcttgtgcagcggttactattgagttaacttctgtagatttttcaccgattgcccctccgtccacatgggatgctgtctgaattttgacatactggatactgtccagataaactggatttccctctgcatctactgcccagtccagatcaaagccatcaccgtagccttctctgtctgtgccgtaggggtttcctgcctcacccgtaaccgtaacatcttcacctgttcccccaacggatttagagttcgtatgtacatccgcatatccgaaatcaggaaatgctgcagccgctgttccataatcgtctttggcatcgcttttcagaagtgcgcccgtaactgttacaggctggtcagagtcaaattccgcattgggatagtattcatttttgggaggatgcattcccaaactcattgtccctgtatttccatacatatccgtccaatcgattctattgtttttaccgttggattcacctttgctgtatgtgagctgataattccatactgtattgtcatcaaaataatccgagccggccagcatgaaccagttttctccatcctccgaaaccatcacattacccggctctgaaaagcctcctcccccattggagttgccatagacaataaaatctattccgtagggattcgccggatcgtttttcacaggatttgcaaatttatatgttatatatcctccgaatcctcccagagagataggggtattccagctggcccctcccatcagcgaacgctccgggaatagaccataattgcccatattcgtatactgagagcctatgcagaaatagtctaccacttccagatctgtgcgaagatttttcctaacaacattcagtctgtagctggcggtctgatcccctgctttcatctgaaagtttaccgactgtccgcctaagcccataagccattgaggaaggtaaatatcgccgtcagctgctgaggtcacatctatgctcatcttatagattccttcactgtccggaaccattttatttccttcgctgtcatagacctccacatcttcctccgatacccggaaagtaaattcaaatgtatccgtacctaaaggcagatgaacatacgcaaatcttgcccccttattgtcgttcatacgtctctcaaacagaggagtccagaagattcctgtactcagtttgggatctttgattaattttgcggtcaaatcaacataatcaggaattcttactttaagtacttcactgattccagcctcatttttcacagtcagaaacagctctgccgccccttctgcgagttctttcacagtaaaagaatttaccccttccaccgctgccgtcccatcgccgctggtatcaatctccggcgccgggctgccttcctcggttacctgataataataggttccttccgtatcagaggtaaagcttatctcggcttctgtgctgctgattctctttgcactgccatcgcttacagaggctggagtcatttttgtcccttttacggttacatcaacagatactggctgtctgtataacttctgcagatcttcagattccggatacttctccgcatatttttcatattttatgctggataaaacagaggaaattgttacggaagtgttattttccggtcttgtcaccagtagattctcatgggtgatcacagatgtattgctggacttaaaggtccggtagccactggttcccatctgatcatccggattaatgtccaccggctgaatgcccttccccgtatcatcgttaatatgataggaccactgcaatgctgtttgatcctcgttccagctaacctcacggaatccatgaaggctctcagttaccttatctttggaaagattcctcccgtcattaattccttcaaagtaggatgcttttgccttttccataagagtgatttcactgtctatatcttcctgggataagggctgtattttcagtggaatttccttatagacactaattccatctttcgtataagtaatcaccagatttacctctgaggcaggactgcccggcagcggctgatagacatatgtgcggtatccgttgatggtcattacatcggtgttgctgctggttacttttatttctttattactgtcaaaaccgatttggcttggaaccggcagcttcatatccccggtgacagcgtcacagtccaaaggttctttcgtaataaaatcttttaactgttctgctgtataagatgtatccagcttttgctgcatctgcgcccgctgttcttcctcatcccctccggttttctttacagcaacctgaaattctttcgtcaggatgatatcctcttcataggtactgttggtcttcgtaaatgtaaacgcagcggtcagcgtcacctgggtatccgaagacggaatggtaactttccctgtataattattataatcccagtcgtatccattctttacaatctcaataatttctggattagaggaagtccaggtgatctgtgtcagactgtttcggtaactacctcccagtatctggggcaaatcaagatcggatgtcacttcctgcagattaacgttttcgccctttatagaatcctctgttactttaggcagttcttcctgttcaagcttgtctttaacagcctgtccatcccagccgatcaaagctctgttagtaatatccttttctgtgtcatttaagaccaggtgatagacaacatccacatttacctgataaacagaagaaaatccggcgtttgcatagtcatcaaaattataataggtaatcgcaccatctgccgcaacatgagaatctgaagaagataaaatggatacctgaacattttctgttccttctatattcatagattttatcttctcttccatcattgtaaccatattactgtccgttccatacgtaggacggaggttatataatttggattcaatctgctctaacagatccgcatctgtgactgacgtatcctttatatgaagcgtcaccgtataggtctgggaagaatcaacagaaccgtcattagctgtaaaagtcagagtggaagttcctgccttgtcaggctgataactataagatgcctctgcttccacgggggcattgccgtttatactcactttatagtttaattcatcctgatcctcgtcagtaaaaatagtagaaagctccgcagtataggcctgtcccagatccagattagcttctgctttgggggctactccctcttgaagcttaggcggatgattcacttccccggtctgtactgtgatgctatacacctctgccggggtttgagccccgtctcctccggcctggttattcatagacggccaggcaggatctccgcatttgacagttatcactgttccattttctaccggtatatcctgagttcttttgtactctgtcccatctacactggatctaacctgaaaattcttattgacagccgtaggagtcactgtaacacttttcgttccctcagggaccgtaagagtatactctttcacgtcccccgaaaatgccggttccagttctccctcactgcattctaacgcgctcagtgttttattgttattgctccaggaacttccaacgtcctcgccgtaattcagtgtataaaggatagatacggtatccccgtcccccagtcctccgctttccactgtaaagtctccaaacccggcattagtaaaccagtcgttgatggttcccatccagccgcttccgcttccccggtcaaaagcggccagaccccctatggatgatatgtaattgctctctgcccccactacttccataccgttggcctcggccaatcttacaatcacatccatagtgctgtctgtctgatagaggtctacccatccttctgccataacacctctgggatccggataggtttctcctgccggtgtaggcactgtgtcctcaatacttacataaacttctccaattggcacgctgctgtctgcagctgccggtacagggatggaggtgatacatagtataacagcagtcaacatccccaaaactcttctcatttttttcattttgacttccctccttgttttatttaatctggcatttctttctttttgatttctttctttttgtcaaccacctcccacatatttcccggttctttttttcgccaaactagaaaagggccttccgccttgtaagcagaagaaccctttattctctctgattttgtgcacgaaaaaaagcatacttccttcacccggaactattgctctcttcctgaatatggcaggtatcctgactccgcttcctcctcaaagaccccttcccggaattcttccagtggtattggccctcttgtccgcattacagtagtggtgactgttccggaatttcaccggattcccttttgctgattacagctaaactaactgccatcagaccatatcagtattatccttgttcatataaaatatatcataaaaacattattttcgcaatcataacattgtaaaccactcacctctatatcctactcaggaatataggtaactccctttgcctctgaaaaagattccccgtcactgctgtaccaattaattcttatcacattatcccctggtttcagaagtacgtgataacttccgtcctcgctgcatgatagtaattcgttgtttagatacactacagatggaacaggttcaaatgtatccacattcctcacgatataagtgaaaacatattcgggatccgttaccgttccttctcccataggagaatagaatacagcctcggcttccggcataatccaacacaaaatcaaaacttccctctcctcaatcacttcgccgtcccagagcatacgaattctgattatattatcaccatccgtcatcttagctatgtaggtcttcccatctgcttcaggcgccaaaagtttgtccctgagatatacttctactgtgtattctctgtcatttcttacaccgtatgcatagaattcatacttttctctggtataaagcccgtcctccggttctgccagatttgtcaccagctccataggagagataattgtgggaacattgtaggttttacttacagatagtatctctccgtccgaggatttataactcacctttatcaatatatcatttgactggttaggcagaagatcaactgtccacagagaatcttcgcacacacctgtctctcttccgtttacgtaaaccttacattctgtaaccacgatacctttgggataagaaatctgaaatgaatatttggtatcatatacagaaataccatctcgaatactcgtatcgaagataaaggaacttgaaggatccgtctttgtattggactcattcgtatcagcaggcagaatctctgaattttcagtttcagcctccgaacctgataaatctggaaatgccggtgtacccgcagatatttcggatatagagacagagatactctcttctgtaattgtttctgatttactaataaaattattcttatctgtctccaaataagaggctggttcagttacccctccaggtttttcagtggacagtaggccgagcattccaagtcctgcatatccgcagacggacaatgcggggatttccggatcgtgaacttcatcccctatcgtgttgtcctcctgtgcagttttgttgtccacatagtccaaagttgcagttttggatatagtcattgacagtaaaagtatgaaaataaaaattattgcactgaggcccacagctatcttagtatgctctatacttctgcaataaatcctgtatcttatcaagctggcatctgcacttatattatgtaacatctcctgctttccttctccatttctgtctttttcattttacaagcgtaacacaactgacgtcaaatgtcatctgaaatatcacccgacaaaaagaaaaaaagcgccactcccaagagcgacgcttttgttatctattcctgataattagttctccccaccgtacaatgtgattaacttattcaggtattcatatctttctttcgcgaacttctcagactgttcaaacagtactgcagccttttcaggattagaacgcttcagagaattgtagcgaacctcaccatccaggaattcctgatagctttctgtaggtgctttactgtctaaggagaatgcaggttttccttctgcctttaattcaggattgaagcggaagcaatgccagtatcctgacttaacagccagttcttcttctgtctgagctttgctcatgcccttcttaataccatggttgatacatggagcataagcaatgatcaaagatggtccgggatatgcctcagcctctgcaatcgcttttactgtctgattataatcagcacccatagcaatctgagcaacatatacatagccgtaactcatggcaatactagcgagatctttcttcttcacctctttaccgcctgctgcaaactgtgccacagctcctgtcggtgtggattttgaagactgtccaccggtattggagtaaacttctgtgtcgaataccataatgttgatatcctgtccgcttgccagtacatggtcaacaccgccaaatccaatgtcataagcccatccgtctccaccgaaaatccactgggattttttagctaagaaatctttctgttttaagatctcctggcctttttcgcatccgcatgcttccagtgcggcaatcagtttgtccgtagcagttccgttggtagcaccgcaattgtagctgtctaaccaagcctgtcctgctgcttttacttcttcgtttgttccgttggcaaccacatcttccacttttgctttcagaccgtttctcacagccttctgagccaataacataccgtatccaaactctgcgttgtcttcaaacaaagagttgcaccatgcaggaccctggcccttagcatttacagtatatggtgtggatggtgaagagttaccccagatggaggagcatccggttgcattcgcaatatacattctgtcaccgaataattgtgtgatcagtttggcataaggagtctccccacagcctgcacaggcgcctgagaactcaagcaatggctgtttgaactgacttccctttactgtattttctttaaatttagcgacaacatcttcttttacaggaagtgttctggtgtaatcgaagtatacctgctctcctgcgttggcttccatgttttccatagcaagcgcttttgcacccttcttgcccgggcaaacatttgcacaggatccacatccggtacagtcataggctgaaattgagatggcgaatttgtaatcagccatacctgtcattggcaatgtcttcattccctccggtgcgttagcagcctcttcttctgttaaagcgattggacggataacagcgtgaggacatacataagcacagcggttacactgaatacagttgtctgggttccatacaggaatatctactgcgataccacgtttctcgtaagcagatgagccggatggtgtactgccgtctacataatcggtaaatgcagataccggcagggagttaccttcctgagcgttaaccttgctctgaatattattaacgaaatctacaacgtcttttctgccgccttctgcatgtgtcattgccagaccttcgtcagcagcgctcttccaggattccggcacctgaatctctacgacctgttttgcaccggcgtcaatggcgtcatagttcatctgaacaatcttatcgccttttcttccgtaagtagccttagcggctgctttcatcagatcaatagcctgatcctcaggaatgatattggccaatttgaagaatgcagactgaagaaccgtattgatacgtccgccaagtccgatttctttaccaatcttaataccatcgatgatatagaacttaattccgtgatttgcgataaagctctttacctgtcctggcagatgtttctcaaggccttccatatcccatgggcagtttaataagaaggtaccaccgtctactaattcctgaaccatgttgtatttattcacataagaaggattgtggcaggcaacaaagtttgctttgtggatcaaataagtagatttgattgcttttttaccaaaacgtaagtgagacattgtcacaccgccggattttttggaatcgtaatcaaagtatgcctgtgcatacatatctgtgttatcaccgataatcttgatggagttcttgttggcacctaccgtaccatctgcgcccagaccccagaacttacagttaatggttccttccggagttgtaacaaggggagcgcctgtctcaagagacagattcgtaacatcatcaacgataccgatagtaaatttcttcttttctgtatttttatatacagctacgatctgagcaggtgttgtgtctttggatcctaagccgtaacgtcctgagaaaataggcactgcatcgaatttggtattctttaaagctgcaactacatctaagtacaatggctcgccaagagaacctggctcttttgttctgtctaatacggaaatctgttttacagtgtcaggaattgcattgattaatgcctctgcacagaatggtctgtaaagacgaacttttacaacaccaactttttcgcctgccgctgttaagtagtcaatagtttcttcgattgcatcacaggcggaacccatagcaatgattacgtgctctgcgtcctctgcaccgtaatagttaaataatttatagtctgtgccgattttggcattcactttgtccatgtattcctgtacaattgcaggtaatgcattgtaatatgggttacatgcttcccttgcctggaagaagatatctgggttctgagcggaacctctctggcatgggtgatttggattcagcgcatgagttctgaacgcgtctactgcatccatatctaccaattcttttaaatcttcgtaatcccatgtctcgatcttctggatctcatgagaagtacggaatccgtcgaagaagttgatgaacggaacttttcctttgattgcagcacagtgcgcaaccggcgtcaagtccataacttcctgtacgctggattcacaaagcatcgcgcagcccgtctgacggcacgcatatacgtcggaatgatctccgaagatggataacgcatggcttgctaaagcacgggcagatacgttgaatacacccggaagctgctcgccggcgattttatataagttaggaatcataagtagcagaccctgagatgctgtataagtagttgtgagagcacctgctgccagagagccgtgtacagtacctgccgcacctgcttcagactgcatctctgttacctgtacttcctgtccgaaaatgttctttcttccctgtgtagcccattcatctgtagcttctgccatcacagatgatggtgtgataggatagatagcggccacgtctgtaaatgcataggatgcatgtgcagcagcatggttaccatccatagttttcatctttcttgccatttgttcttttcctccttgaaaattgttctgaacaatgttcttttggacctgcagatgcaggtttcccgtttgcatacttctacccgaagtctaatccacattatagcacgttcccataggaatgtccaacccctcaatactggaaacatcaatgttttttgaaaaaaacaatctagctttccaggatttcggccatagatttggagctaagttcgtccatcatcagctgctgaatcctgcataattctttgtggacctggcaatgcgcatgcacggtgtcacggggacagggtttattgggatccaggcattcaatcatatagaatgcgtcatctacagccaaatagagatccagaagtgtaatttctgccggagatttagacagggcgtagcctccgttgctgcctctgaagctttgtacgatccccgccttttccagtttcttaagtatcttatatacaaaggcaggggtcagctcctcctttccgcaaatatcgttcacgcaggaacgccctccagaagataacgcccgtacaatgcgaactgcataatcgcattctctggttattaacattattttcccaccattcctttcttttgcatattatttctattttactgatttatcatcattcgctctacagatatcataacaattctggagaaaatataccactaattttttcaaaaaagacaactaaaatataggaaaattcgtagtatatggtaaaaaatggtatatttattgtacttttatgcctactttccgatcatatggcttcctctgcctggaattccccgccatgcgaccgaatcctgttttacggaatttattctttctcttgtcaggaaccgcctctttcagttctctgcccttttcttccctgacctctctggagagaaaagctgccgcaatatcaagtgaagtaatatcttctgtctgcagttcagagagatatttttcaatagtatctgtatatttcaaatgttgttcactttttaatatcttattgatctccctaaatacccgatctgtcttaacatcttcaatctctgaaagttttggaatcttcatgtatttgatcttagcttttgtataacgcataatttcccttagcttatacatatctctcggtcccacaaacgtataggaagttcccgtcttgttcgcccggccggtccgaccgattctgtggacatagtactccagatcctctggtatatcataattaaacacagcttctacattatccacatcaattcctctggcagcaacatctgtggcgatgagtatctcggcttcctggctcttaaactttttcataactctgtcacgctgggcctggcgcatatccccgtgaagaccttctgcgccgtagcctctggccactaattcttcgctcaactgatctaccatccgctttgtattgcagaaaataatagacagtttataattattgagatcaatcaaacgggccagtacctcaatcttgttttctttgctcacttccagataatattgctgtatggaaggaacggttatttcctttttggtcacctgtattttttccggatggtttaaatatgtcttcgcaatactcaatattgccggggacagggttgctgaaaagagtacggtctgacgttctttggggactttctttaggatctcatcaatatcttccctgaatcccatgttcagcatctcgtcggcctcatccagaaccaggttcgtcaggtgctccagttttatggtatgccgccgcatatgatccatcagccttcctggcgttgcaactataatctggggtttctttttcagtgcggtaatctgccgctctatattctgtcctccgtaaataggtacaattctgatggaatttttatatttcgtaagcttatacagttcttctgttgtctgaatcaccaactctctggtagggcagaggataagcccccgtacctctttcgcctccatatcgatggtctcaatgagaggaatcccgaaggcgcaggtctttcccgtacctgtaggtgcttgggcgatgacatcttttccttccagaattggcacaatactctgactctgaatgggggttgcctcctcgaagcccatgtgtctgattgcccgtttcaattcttttgatatctctaaatcattaaataaaatattttccatataggatttttctcaactttcctttttctctgcctgtctcagcagattattaattttgcttaataccctggcaaactcccttgaggtaaaactgatatggctgtcttttctttttgcccatatctcaagttccccggcgtcataccaggctaccgattctacctcttctttctgcagcactaatttctctgtaatcaccggtttctgataccagaaaatagtatctctttcatagtctgtaaaagctttctctcccgaggtttccagccagtcattactctggcagaacaaatatgtcagatcacccggctgtgctgtaattcccagctcctctttcatttctctcacagctgtctgcacggcgcagtcccccgcatcaatatgccctgcacaagcagtatcgtaatatcccgggtaagacgcttttgacctgcttctcttctgaatcagaaattccagatgcccctctctgatacgtgtcacataaactcttatcactccgtgaagagcccccgccatatgcgcctcataccgttccattacaactccggtttttgaaccgtcttcctgtagtatttccagtttttccaatttattgcctcctatatccatcccaggcttttgctcaggaaaatccatcctgtcagcgtaaccgaacttagcagcgttgtagcagccactatgctggatgtcagcactccgtcattatccatattctgagccattatgtaactgctcactgtggtagggcctgccaacataatcaatatagccatcattttctcgtatcggaatcccatagcagccgccaggggtacaaataccataggcagagcaatgagctttataaaggctcctgctatggttggcttaatttttgccatagccttctttccctcaaatcctgcccccatggccaggagcgcaagaggcgtggcaatagctgcaacgctgtccaccgttttatccactatggccgggaacttcagcttagtcagtgaaactatcagcccaatgacaattgccagtataatgggatttttcaggatttctgttaaggaatcttttattttgctgttttgactggaggagtcaccattgccctcaaatgtgagaataataaccgaaaaaatattatacagagggacgcagccaataatcattatgggagccatccctgcatcaccataaatattttgaataaaggccactcccaagaccgcagcactgctcctgaacgaagcctgtaccagtgcacctgtaattgttctgtccttaaccagtttctttgccaaaacccatatcaggacaatacttactacagtgaccccagcacagaataagaccattttggtatcccattcctcctgaatagaagctctggagatatctttaaaaagcaataccgggagagttactttaaagttcagactgttacagacctttacaaattctgctgtcagcattttcttcctatataataggtaccccagaaccatcaccaaaaagaccggaaccgtggcattcagactgaatataaagttttccatggtttttacactttcttattttttaagcatttgtaacgtatctattatagacatgttactggaattaatcaataacattttgaaaattagctggattgaagtataaattatggttttgtgtatgtgaagttcgggtgaaatagtcggcgagcggagtgtcgcagacggacggatataggagggagcaccggggagacagggccaggccgacgacgcgggatttatctcaccgtccctccgccaccttatacctttcgactggaaagactcaaacttagtacattaaatcccaagtaaacaaattttccaataggtcttgcaaaatcataattttactgtacaatagataaagactatgtataaaaataggagtgtaaccaaatatatccatatattaataaaagcgaggttttaacatgattgcagcaaacaatgtcacattgcgtatcggcaaaaaagccctgtttgaggacgtaaatattaaatttactgagggtaactgttatggcttaatcggagccaacggtgccggaaagtcaacatttttgaaaattttgtccggacagttggaaacaacaaagggtgaaatcaatatcacacccggtcagcgtctttcctttttgcagcaggatcacttcaaatatgatgcgtatcctgttctggacacggttattatgggtaatgcccgtctgtaccagattatgaaggaaaaagaagccatttacgcaaaagaggagtttacagacgaagacggaatccgtgccagtgaacttgagggtgaatttgcagagatgaacggatgggaggctgagtcagatgccgctatgctgctgaatggtcttggcattgatacttcactccactattctataatgaaagatctgaacggaagtgaaaaggtaaaagtactgttagcccaggcattattcgggaatccggatattcttcttctggacgagcctaccaaccatctggatttggatgctatcagctggctggaagaatttttgattaactttgagaatactgtaattgtggtatcccatgaccgttattttctgaacaaagtttgcactcacactgcggatatcgactatggtaagattcagctctacgcaggcaactatgacttctggtatgaatccagccagctgctggtgaagcagatgaaagaggcgaacaaaaagaaagaggaaaagatcaaggaactccaggagtttatctcccggttcagcgccaacgcttcaaaatccaagcaggcaacctccagaaaaagagcactggaaaagatccagttggacgatatacggccgtccagcaggaaatatccgtatatcgacttccgccccaaccgcgaaattggcaatgaagtgcttatggttgaaggattgagcaagaccatagacggagtaaaggtgctggataatctgaccttcacccttggacataatgataaggttgcctttgtaggcagtaatgaactggcgaagaccaccctgtttcagattcttatgggtgagacggagcccgacgagggaacctataaatggggtgttaccacatcccaggcatattttccaaaagacagtactttagaatttgataacgatttaaccataacagactggctgacccagtattcagaaatcaaagatgcgacctatgtccgcggcttcctggggcgtatgctatttccaggggaagacggcataaaaaaggtaaaagtactttccggaggggagaaagtacgatgcctcctatctaaaatgatgatctcaggtgctaacgtattacttctggatgagcccaccaatcatttagacatggaatctatcacggcattaaacaatggcctgatcaaattccccggagtactcctcttcgcgtcccacgatcatcagtttgtagaaacaactgcaaaccgtattatggaaatcgttcccggcggcgccttaattgataagattacaacctacgatgaatatcttgccagtgatgaaatggccagaaaacgtcaggtatataccatgacggaagaagataattaagttttattcattggggacagggcagaaccattttgggacaccccgatctcaaaaggggacgtgttctttttagaaagaacacgtccccttttgcaccctaaaacggcgtcccatccaagtcatacggcgtcgtctgatacacgtaataattcaaccagttcgtataaagattattggcatgcgccctccacataagaaggggccgatcctccgaattgtcattgctgtagtaattcttaggaatctgaatatccagtcctttattcagatctcttttatactcaccatccagggtcaccctgtcatattccgggtgtcccattacgtatatctgtcttccttctttagccattcccaggaaaaagccggcctcctcggattctgccagtatagtaatatccttacaagccttgatatcctctaacggtacctctgtatgacgggaatggggagctaaaaaagcatcgtcaaagcctctcaccagagggattttccggttcatcaccttatgccagaagagtccgaacatcttctcagagagtacctttttcttcagcccatagtgatagtacaaaccagcctgcgccgcccagcagagataaatggtagacgttacatgcttttctgtccagtccataatttctgtcagctcttcccagtaatccacttcttcaaactctattaattccacaggtgcacctgttatgatcataccgtcaaacttattatttttcaggtcctcaaagtgaagatagaatttgttcagatggctggtagatgtgtttttagactcgtgactgctcatggtcataaatgagacatctacctgaaggggcgtattagaaagggaacgcagcagctgcagttccgtctcctcttttaaaggcataaggttcagaattaatatctgaatgggacgtatgtcctgatggatggcacggttttcgtccatcacaaatatattctctttctccagtatctcctttgcaggcaaatctccctgtactttaatcggcataccgtattccacctaccttttttatttaataactcattatagcatagaacaggaaatgtggaaaagaattattttctgtacatttgttgtttctacacggacactatcacggtctgctccgcacacagtaacacaatttgctagtctgtggcatatgacaggaaccacacatggcctgttttacattaacggagcaaaaagccgcagaattttgccttccagccgcacgaaaacgcccagctttttatagtcttcaagcgctatctgtctgcatttctttagagtatcctgaaagtcctgctctacctggcagatctctttatggcggtacaggaaggctgcacattcaaaatgaagatacagacttctgtaatccatatttatagttcccaccacagctttttcattgtctgatgtaaagactttagcgtgtacaaaacccggtgtatactcataaatctctacccccgcctcaatcaattcattgtagtaggtcttagccagggcaaacgctgtctttttatccggaatgtggggcattataattttcacctcaattccccttttggcggcgtatgtaagggccataatcatttcctgatccaggatgagataaggtgtcatgatatgcacatacgttttggctgtattcaaaatatccagatatactcttttgcctaccctctcactgccaaatggcaccaccccgtagggaattacaaagccgtcattagcaggccccttatgagcaggcactatgtatgccttataattttcttcacgaagcgtatccacattccacatttccaggaacatgaaggtaaaactctttgctgcatccccccgaagcataaccgcagtgtccttccagtgtccgaaccgcactttctgattaatatattcatccgccagatttacaccgccggtaaaggctgtttttccgtcaattacaagaatctttctgtggtccctattgttatagtgggaggagaaaaaggctttaataggcgcgaacattttacattggatacccattgccttcaaatggtccgggtaatgataaggcatcagtgccaggctgcacattccgtcatacagaaagcgaacctccaccccctcccgaaccttctctttcaggatctccagaatcgaattccacattatgccctcttctacaataaaatattccataaatataaatttctctgcccttttaagttcccggagcatagcctcgtatttatcttcacccagaggaaaataagtaacatctgtatttttataaaccggacaattatcatactgatacagataggaggcaaggtggcccatctccgggctaatcccctccagttcctcctgtacgtccctgtcctggacaacgtattctctggtacttgcggaaagtaatcgaagtctcctgtacatcagctttgtgcctggctgcagctccatataaatataaaacagtgccccgaagacgggaactataagaacaggtatcatccataccagcttaaaatcgggatttccccgtttatttacaatgtgcagcagcacggcaaagcctatgacagtaaatcccccatagacatagaacacgtcatctctcagccacaaaaaggcggcaaacagcgcgaaaagctgcaggagaatggcaagtatgactacgatcgttctcccaaatataattcctttaattccttttttgctctcttccattgcttaacaggcctctatcctaacatatttaaaaactcttcttctgtaatgatgggaacgcccagctcttttgcctttttattctttgaggaagcagaagctgaatcgttgttgatcaggtaattcgtctttgaggtaacgcttccggtcactttaccgcctttggactcgatcagctcctttatctctccccggttggcaaagcgctccacacttcccgttattacaaaattcaaccccttgaatgtctgctcttcatcccttgcaacctcctccagctgcagatgagacatcaggtggtccagagctcttcggttctcctctttgtcaaaatactcccggaacgtccttgcgattaccggaccaatcccttcaatgctgctgatagcttcctcgtcagcctctgtcattttctccagatcgtagccgaattctctgcaaatcactttggcattagctagtcctatgtttgcaattcccagactatagatcacccttggcaaagtggtgtttttggacttttcaatgctggttatcagattatcataagacttccttccaaacccctccatctcaacaatctcgtcctcatactgcgccagctcatagatatccccaaaatcccggataaagcctcttgccacgaatttctccagggtggcttctgacagcccgtcaatattcatggcatctctgctcacaaacagcgtaaaggatttgatccgttttgcctgacactcccggttcatacaatacagagattctacttcattggtcttgatcacctttgcttcctgtccgcataccgggcaggtatccgggatcgtaagatggttgcttcttgttaagttttctgcaatctgaggaatgatcatattggccttatatacctggatacgatcaccgattcccagttccagttcttttagtatactgatgttgtgtacactggcacggctcactgtggtcccctccagctctaccggctcaaagatggccactggattgatcaaaccggttctggaaggactccattctatctcttttaatgtcgtctcccggatctcatctgcccatttaaatgcataggcatttcttggaaatttggaagtacttcccagcgactctccgtaggcgatgtcatcgtacagggccaccagaccatctgaaggaaaatcatttttcactacctgttcagaaaaatattccatggcttcatccaaagtttccgccgtaaccatgcgatattccaccacatcaaacccctgcccccgcagccattccatctgttcctttctggaattgtgaaactccacatcctgtgcagtcaccagagaaaaggcataaaatctgacatttctcttcgccgtaatctcgttattcagctgccgcacagaaccgctgcacagatttctcggattcttatatctggcatccacatcctctatttcttcgttgatttttttaaaatcagaataggttatcacagcttcccccctaagaataagctgccccttgtgagcaatctgaaggggaatatttttaaatacctttgcattattggtaattacttcccccaccaccccatttccccgggtaaccgcctttatgagtgtccctccctcataagtcagtacaatggtaagaccgtccagcttccaggagagaagggttctgtgctctcccacaaagtctctgagcgcttctacatcctttgtcttatccagagaaagcatagggctcccatgcgcctctttgggcagctcatccagggactcatatcccacagataccgttggacttccggccagagtaactcctgtctccttctccagcttctgaagctcgtcgtacaatttatcatactccaagttactcattatttccctgtcttcctggtaataagccttgccggccctggttaagagacccaccagttctttcattcttgccatcgcatccattgcgtcacatatcatcctttctgactactgttgtattggaggagtctttaatctgcttcataagctcccgccattctttttgggtcaccggacggtattggcctgccggcagatctcccaattcaatattcataatcctgactctctttagtcttatcaccctatagcctaaatattcgcacatccttcgaatctgacggttcagtccctgtgtcaggacaatacgaaagcgcctggcgtcgattctctctacccggcactttcttgtaacagtgtccaggattggaataccaccggccatctgtctcacaaattcttttgttacaggcttatctacagtcacaatatattctttttcatggtaattgccggcccgcatcatcttgttcacaagctccccctgattcgtcataagaatcaggccttccgaatccttatccagccttcctacaggatagatacgggtatgataattgacaaagcggacaatattattctttaccttttcctgggaggtacactcaattcctctgggcttatgtacagccaaaagcaccttttcttcctcccgttttacgggctttccttccacgagtatcttctgagagggcaggatcttcatccccacagcggcccgcctgccgtccacagtaatctttccttcctccgccagacgatctgcctctcttctggagcatacacccgcctcgctcaaatacttattcagacgtatgggttcctgcattattcacatcctcttctgacacccggaacttatccaggaacattggcataagggttttactataatccgaaagagagagtcttccctgggatatgcaccagtcatagataaatgctctctcgcacagggcataaacattcgttatttcataggctgacatcatggtactgatctggcctcttttttgaccctcgtccacgatccggttcaacatgcggaaatatattctgttctgatccataaggtgcctgtcacccttggtaaccagctgggaagaatacatggacgcaaggatctcccggtttacatgttcgtcaatcattttaaataactcccggtttaaatataacaatttatcgaagctgttcatctcaggatccatctcctgctccagatgctcatacttattatcaaacaaatccgataatgtggtcagcagagcgtcctttccactaaaataatggtaaaacgtccctttggaggttcccgagctggcaatgatgtcatctaccgtagtattatcatacccactctgataaaacaattcccaggcagcttccacaatcttatcctttgtagatatctttttctcctgtttcatctgtcattccgctcctatccgctatagcatatcctttattataactgtttcaggttgacaattcaaggaataacctgaggagattacgggccctcttcataaattcttaattcttcttttgccccaaaaagccccttctttcttgttttttcccgtccagagtgtataataaggatgaacgtaaagaaggggattataaatatgagtgtaaaacgcaaatctaaaagacggcggcaggtggaagtcgtcttctcggtatttctcatcatagcaattgttctcgcgattttgatcgtaccgagatacgtaacagccgctgtaaaatcatatcagaaaaccatgaaacttcaggaagctgcgttaaaagaagaccattgggtatacagtgaaaagggaaggcgttacgtgtacgccgacggaacttcccccagaaataaatggcttgcagtggatcaagtgaattatcactttaattcggatggttatatggataccggatggcttcaggataagggaacccggtattatttgaagcccgacggcaccatacagacaggctggctgaatgaccagaactcctggtactattttaacggggatggaacaatggcctctggatggattctggatcaggatacctattacttcctaaaagatgatggcactatggctaccgggtggatcgaagacaacggaaaacactattacctctcagaaaacggagccatggccaccggatggctggagctgaatgggaacaactattactttgatgacagcggtgctatggctaccggatggattaccgttgatgataaaacctactttctaagagacgacggtgtcatgaccatcggctggatcacagaaggagatcagaagtattttatgaatgccgatggatccaaggcagtcagcacctggattgaaagtgaaggcaagcggtattactttgacgaaaatggttctctgaaaccctccggttggctggaaactaataacacatggtattacatacaggaggacggttctgcggccacaggatggcttcagcttggaaagcaatggtactatctgaaaaatgacggttctatggctaccggatggatcacagatgagaacggcaaagcttactttatgaaagataacggtgtctgggaccctaatgctaaaaaagagacaccatctgctggaggcggccctatggtcgcccttacttttgacgatggtccaggcaaatatacagacggtattcttactgttctgcagcaaaacaacgccaaagccaccttttttatgcttggcaaactgatcccaaaataccctgagacagtaaagcggatgaaagctctgggctgtgaactgggcaatcattcctacgatcactccgatctgagtaaaatggatgccgccggggtatcctcccagatcaatactacaaaccaggcacttgtagatctggtgggagaaggcgcttcctgcgtacgcccgccctacggcgccttcaatcccactgtccgcagcgcggcaggagcacctttaatcctctggtccatcgacaccctggactggaaaaccagggatacccagaccaccatagacacggtgctcaacaatgtcaaagacggcgacattgttctcatgcacgatatccatgaaccttccgcaaaagctgcagaaactttgatacctgccctcagggaaatgggatatcagcttgtaacagtaagcgaattagcggcagcaaaggggattcctttagagaatgggaaggcgtatggggagtttcattaaattatagttttgtgtatatgaagctcgaggtgaaatagtcggcgagcggagtgtcgcagacggacggtcaagggaggaggtcttggggccaggggtactgtgtggatctgcttgctgctgcgtttctcctcagctaactgcctggccgttcactaagaagctcaggaaagccttcgctcctaagtgaccgccggcagtggatcttcggacgcactccgtagtctgcgcagttccacacagtacccctggccccaagacctcctccctcgacctggcagagactcacttcacattcacggaaaacggggggaaaggtcgagagttgtacacttttcctcttatttctcactattgtccgcttgatgttttggataaatagctccccctggaacttctccatacccaggtgagaggaattctgcggcggtgggctggctggttcgggcgggagggaggcttaagttccggggacgattccgcaggagtgactagagagtcttaggcaaaaccgggatttccgcaggagattttttcggcagtcagggccgaaaaaaagtgagcatgggcagagaatgcacatcaagcattcttttcacatacgaacggtgctccggcggggattccggttttgtcttagactctcttcgcgacggaggtgtccccggaacttaagcctccctcccgcccggaccagccagcccgctgccgcgggagtcctctcaccgtccccctgccacctacacctgccgtcctgaatcaccttgagccgaagtccaagcgctacacccctaaatcccaattttcaacaaaaaaggagctgcatcacctgcagccccatactatcactgtaacaaatccccgcggacataccctgtcttgccgtcaaactcgatcttaatccagccattatccgcattctctattttctttacctgttcaccagcctctaattcaccgattttttctgaatcagtatctgcttctgctctgacgttgcatccattgattgccgaaactgtagaaccgtcggcagccatgctggcagtggtagtttcacttccaagctggtcttcaaactcccgaagcttgtcatccgattcctgggcttcctggaattctttctgcaccttgctaatcagttcttttacatcttcttcctgaaccactttggcaatatagtcctggacttctttgtcatcatcatctttatggatgtatacctttccctcatcatctgtctcaacatatacctgagtcaaaccgggggcaggtgtgtcaatatctacaaatttcaggtcataggagacaaatactacataacttccctctgtcagaccttttttggtgtaagtgtcaatattgctgtagctttcaatgtatgtagaattcagcactttggcctcatctgcagaatcaaagctgtctgttactcttttcatactgtcaatatctttgttgccccaggcagtataaaaagtattgatgattgcatttacttcagggtaggcatttttctgtaaggcatccttgtcttctgtattcgtatcttgtgcatctttggaagagtcatctgatttttcggatccgccagatgttttttcctgttccgttttctgtttgggctcactgcctttatccttatctccagaaccgaataaggcttttgctccaaaaaacagaaccacaagaacgactaaaatcgccagaccaagtaagatatatcttaggttgtctgacagccattctctaaaattgtctaacatgattgtcctcctttaaaccatagcattcaatctcccttattcttgctatgctctccccctatagtgaaacaaacgcatccggagggattcgaacccccgacacgtggtaccggaaaccactgctctatcccctgagctacggatgcatatcagtcactattaatcaatcacccagctatcataccataaaattttgaacttgtaaaggcagaggggaaatttattggcgcttcccccctgcatacggtctaaattaaggccgctattttacgttctctccggtcaaaatagtatacatgatctgagagtatctctgtaggttccacatgggaggcattcacctcccgcaccattgcagacagttctgaaggggaatattccccggaatcggggattagaatacattcgtgaatactgctgggcagtatataaaagctggcctttagaatacggccgatatgattcaaaagctctgggtacaggagacaggaagctccgtaatacttatcctcatttgtaagtataaacatgccgtcgtccgccatgtcagaatcatctgcgggtgcttcccaatcagaatcctcctccaggagagcttgtatcatctcccccatcccccgaaaggtatacgggagtttttcaggggtattgcggtttgctgactgaaaaagctcttcttttgtgatcttccagtgttccagattgttgttgtgaatcagtactgtagcgccggagagagaggtttcctccagacggtagtaaaaggctactgccaagtccatataagggtaatgaggaattctctccagcagttctttgtttttttcataatttattagtttataataaatctgatctttcactttttgataatcaccgaaagcctccatggagatatcagatacattccccaaaagatactgccttcttatctcccgtacaaccttgtagaattccagcccgccctcgaaggcttcgtagtagggatccaggtaaatcacgggcgctatcctttcctccttctttctgatagaaatcccctggcaacatacgccattattcttctggacctgctgaagcgtaatactcacctcctctcccatctcttggcagagggcatctctgagccggagtctgaatgttttgtaatccaaataatcatcctttctgtagatttttttatttttatacggcttttttctgcagtgtaccctgattgcgcacacgtccgaagcaatgaatgcatgaaaagaaagccatagaaaaaccatagccgatagatctgtatttacttctttttattatgggaactggtgcacgaatgtgcctgaaaaaaggacccgccgcttatgacacggcgggtaatcatgctgttatacgcgtgaaagatattcgccagatctggtatcaatcttaatcttgtctccctgatccacaaacagaggcacatataccacagctccagtctcaactgtagcaggctttgtagctccctgtgcagtatctcccttaaagcccggttctgtttctgtaatctccagttcaacaaacagcggaggctcaacagcgaatacgttgccattataagaacataccttcaccatctcattttcttttacaaattttaatgcatctccgatatcgtcagcgtttaatgcaatctgatcatatgtctccacattcataaagtggaataagtcaccatcagaatacagatattgcatatcaacacgatcaatgtgcgcctgagggaacttctcagtaggtctgaaagttttttccacaactccgccattgataatattttttaactttgttctaacaaacgcagcaccttttcctggttttacatgctgaaattcgataatttgaacgacattaccatcaatctctaatgtaataccatttctaaaatctcctgctgaaatcatatagatattcctccttaatcgtacctcaggaaaatccaaatattttcccgctatcttacattctataatacctaatctaaattttcaactattttctcaataatctttccaaaggactgtctgctggtgtcgacttccaggtccgccgcttcccggtaagcctcctctctttcctccattaatgagatgatcttcttccggagatcaccgccctgaagcataggtcttgaggtgtctgtctccagcctttccgccagaacatccacagtagcagtcaaaaaaatcactttccccatgtttctaaggtacggcttattctgagactgcacagggagtccgccgcccacggatatgacacaggggctgctcgcctctgagagctcttttatggcctctgtctccagctgcctgaaatacgtctctccaaatcctgcgaaaatatcactcacagacattcccattttctgttcaatcatttcatctgtatctacaaaagtaaggtccagacgttttgcaagcctttttcctacggaggtcttcccgcatcccataaaaccaatcagcactatgtgattcactttacattcctcttttctttttgtaaaaatatagtactattttctccagataccgtttcagcacaatctgtatctcctccctgggatgtatgggctgcactaaaacggtggggattccggctctttttgcgccatagatatctgtaaagagctgatcaccgataaataacgtatttgtctgattggtccccagcagtttcatggctctgagataattctttggggagggtttgtgggcattctctataaatttgacctgtacctgttcattaaaagatgctactctctcccgccgattgtttgagatcagacagcagccgaatcccaattcctttagatgagaaaaaagctccatggctcttttgtccgccggcgctccatgaggcaccagtgtattgtcaatatcaaaaagcagcccccggtatccgtcccggtacaagcggtcaaaatctatcttataggcagattccagatattcatccggataaaatttttcaaacatatctattcctccgtctttctctccctcacgaccggcattctcagaaattccaacttcgtctcagccgtaataactgcggcaaaaagcagcagacatcccacgatcattctgcctgtcattatctctcccaaaagcagaaccgaaaacaggactccgaatacggattccatagataaaagaagggatgctgtgttgggtgtcgtatatttctggcagacattctgaaggagaaatgccagcatggtgctcagtacgccgagatacagcatcccgatgataatgtctttttggaatgcccctgcagggaatcccccgtccataaccggagatactatccacgaaaaaatcgctgcaaaccccagctgcagaatggtaagaactacaggatcctgcttttccgtgtaccgatcaatataaatcatatgaagcgcatacccgaatccacagattaaggtaagcacatcacctatattcatggtcaaatcgcctttcagcgacagcattccaatccccacaatggcaaggaatgccgcagcaatacagaatgcatccggctttttatgattcatcatccaatgtaaaaaagggacaattaccacataaactgtagttaaaaaagcattcttacccgctgttgtatagtcacatcctattgtctgcagaagataactcataaatagaaggaaccctaacacagctccttcttttattattttcctatttagaaactttagacgcttccaaaaaatagctgccaggagtacggcagcgatggtaaaacgaaatgccagcatataagaggctggtatcagatccagggagtttttcactaccacaaatgcaaatccccagataattgctgttcccaaaagcccaaagctggctaaaacttgtattttcttatctgttgtactcacaatacttttcctgtccttatttccttctatttctccaaaaaatccttcatggcttcaaactgttccttcattgtatcataaccatgctggtaaaactctataagatgttcatacttttgttccgttctggatactggttttacagaggggcgtaccacgaaaacttttccctctctctcccatttttcaatatactccaatgtcctgttataccgatccgcacgggagaatatcgttcgaatcagatttggatacccggaataggctgccacatacaggcttttgcttttttttagatttctttttctgtagccgtaattccttgtgagaataatgacattctttttatgtcctgttttcagggaatgtataatgggaatagaatccgccaatcccccgtccagataaggaatgccgtctacggtgaccatagggcttgccagaggaatgctgctggaagctctacatattttcataagtctttccttttttaccgtctcattcagatactcagctttacctgtgatacaattggtaaccaccagttcgcactgaagagaagactgaaagtacgtatcgtaatcaaaaggatagatttcattgggatatttatcgaaaatcatgtccatatcaaagagacttctgtttttaattgtctttttcaagtcaaaataacgattttctttctctttgtgtatcatacagtctttcgtcctgcccgcctgccttgacacatagtctacggcattgcaggcgccggcagagactcctgcaatataaggaatatagtaatcctgttccataagataatccagggccccggaagtaaagacgcctcttgtggcgcctccttccaatacaagacctgaacctttttttgctgtcatatttatacgtctcctattattttctgtcatgcagcggggtatacgcctgttccggcataacgctcttataagccggccgtataattttgtctgtgttgatcagctcctccatcctgtgagcactccatcctacaatacgtgcgatggcaaacataggggtatagagctccaacggaagattcagcatactgtagacaaatccgctgtaaaagtctacattggcgcttacacctttatatatatggcgttcctcagcaattacctgtggggcaaggcgctctaccatagaatacaggccgtaatccttattcctgcctttttcttttgccagcttctctacgaagcccttaaatatctgagctctcggatcagaaatagaatataccgcatgacccataccatagataagccctcgtttgtcaaaggcctccctgtggagaagttttaccagataatttctgacttcgtcctcgtccttccagtcatgcacatgttttttcatatcatcaaacatgctgactaccttaatatttgctccgccgtgtttcggaccttttaaggaacctaatgctgcggctatggtagaatacgtatccgtgccggaggaagaaaccacatgggttgtaaaggtagagttattaccgccgccatgttccatatggagaaccagggcaagatccagaatagttgcttccagaggtgtatactctttatccggcctcagcattaacaggatgttctctgcagttgacagttcctttgcgggatggtgaatgaaaaggcttttatccttattataatgctggtgggcctggtatccatatacggaaagcatgggaaatacactgatgagattgatacattgacgaagtacgtttggaagagagatatcttccggattcttatcgtaggaatataaagtgagaacgcttctggacagagtattcatcatatccctgcttggtgctttcataattacatctctgacaaaatttctgggcagagagcgctgggctgccagcatctttttaaattcttccagttgagtttctgtgggcagaacaccgaacagaagcagatacgttacttcctcaaaaccaaaccgcttctcctgaagaaatccccgggttaagtcgtagatgttaatgcctctgtaatataactctccctcacagggaacagactcaccatctacttctttatatgcctgtatattggaaatctgtgtcaaacctgccagtacaccttttccgttcaagtcgcggagtccgcgcttcacatcgtactttccatatagagaaacgtccattttactgttatccaggcaaatctgtgtcaattcttctagctgtggtgtcaccttcatattaaatgctgccatagtactttctcccctttctactttttaaagtattttgtatacttaacgcattactatattatagcattaaaatataagggagcacaatacaaggaattctaaaataaatatgaacagcattcattatcccagtgccacatccagtatcatcattaaaagaaatccggtcataacccccaaagttcccagatgagagtgttcatccagatttgcctccgggatcaattcctctgtcactacatagatcatggcccctgccgcaaatgccagaagccatggcattactgcctgggctctcattgccagcatagccgccagcacacctgctattggttccacaattcccgacatgctgccatacaaaaatgctttccacctgggcagcccctcctgtctgagaggcagtgagatagccgctccttccgggaagttctggatgccgattccgactgcaagggccacagcagctgcaagggctgccggatccgccccttctgtcactgcaagggcaaaagcaacacccactgccatgccttccggagcattgtgaagtgtaaccgcgaaaaccagcatagtcgtacgttttaattttgccgggagtccttctcttgtattggaattcgcatgaatatgtgggagaagcttatccatcaggcagagaaatatccctcccagggcaaatccccccgctgccggtatccatccaatcaaccccatctcttccgcctggtcaatggccggaatcagcagggaccacacggacgccgcgatcattacccctgctgcaaatccaagaaagactctctggtactcctctttcatctccttccggaaaaagaatactaccgcagctccaagactggtcattaaaaatgtaaaccctgttcctccaagggcataaagcattgattgtgccaaatcttctacctcctttacgttaaagtcttcttcattttaccatatcctattttaaaaatatagggtatcccttttctccgcaaattgttaaccaaaataatataatagttgacaatctatattatcttttatataatgctcatagaaaatgaaaaaggagatcacatatgccccaggaaaaaataaaatcactctctgtgaaaagcttaacactcataggccttatgacagcagttacctgtatactgggtcctctgtctattcccttacccttcagcccagtccctatatccttcacaaatctggctatttatctgtctgtctttgttctggggatgaaaaagggtacggtaagctatatcgtatatctattattaggaatggttgggcttccggtattctcaggatttaccggaggacttggaaaactggcaggacccaccggaggatacctggcaggctttatttttctggccatcattgcaggcttttgtgtggataaaggctctggaaaactggcctgggcggtgcccggtatggccgccggaaccattgtctgctatctgtttggtacactttggctttgcatgcaggccaatctgactttttcagcaggccttgccgcgggagtaatcccctacctgccaggtgacattgccaaaatcatcctggcctcactagttggaccggctttgcgaaagggcgtccagcggctgcaataaatacctgccccctgcatatactgataaaaaacgaaaagagttatgtatggctatttcttatattccagtctatggaatcattcagaatatggaaaatgtatccgggcagtgctgccagcagctggttaccctgcgaacagaagagggtgttgtccgtcttatgctggcccccgatacctatgtaataggcagcgtccgcctgcgtccgggtatgtctgtagcagctttttacgacggcaatgcaccggttcctctgatttatccgccccaataccgggccttgattattgggcagcgcaatccgctggagaatattgcggtcaatttttttgacagcacactaactgccagcgacggttctctgaaattaaacccaggtccatccacagatgtgatcacttcaaacgggcagcgcttttcctgtagtctggcaaaccagactttaatcgtgtactaccgggccactaccagaagcataccgcctcagaccacaccgagaaaaataatcgttttatgtaagtaaaaaaaggcgctgcaaaaccggccttccagtcggttttgcagcgcctttttatcccctcccttgttcttaaccacagtacccttccaggatctgttctaaagcacttccgctgctgctgtggcatcttataatttcagtgtcatttcttttcgcctcatctaccgcacatttcaccattttgtgagaaactgtatttgtaaacaatacaaatagatccggggttcccacctgttttttcagatcccctgccatctgggtaaatacctttgccttacaattatattttttgcaaatatttttatatctggttgccatcctgtcatggcctcctataattacaacactcatacactccccctttatatcctggccaaggcctcgcccatagcctttaaagcagcctctgcctcatcatcgggctcgttgtttgcaatcacgcagtcgcagacaaagactgctccgactttttcacactgacttttccagttgtccatccactcgccagttccccagtcataggaaccaaacagtgcgatcttttttcccctgagcttttcctccaccgcctcaaacatgggcagaaattctgtttcctccagttcttcatctcccatagccgggcacccgaaagcaatagcctcatactgatctgcaagcccagatccgaaggtttccggtgtaaacacatccggctcagagcctgcccggactgccccggcttttacaaactcagccatagcctccgtattacctgttccgctccaatatacaattgcaattttactcataatcacctctccttttttctatgaaacaatttattttctaagaataacgtttctttttttcagcagtaaaggatcttcttaactataaggataccgttaactgcctgattgattttccctggagaaaaagccggctgtagatccgcctgcatttttcatataaagcaaacgttcttttggctgactcctcttcgcaatatactttccagcagccgcacatacggcaattttttcctccatattcaatgaagccttctacgtcatgaatggggtatcccaaaaaaagacctatttcatggggaaaacaggaaaaattctcacagcggaggcttaagtgctgcatacattcttctgtgttcatcccagcataaccatatttcttaagaatttgctctgccttttcttcctgtaaaacattctgcagtctgctaactctgtagacataaatcaaggcttttctctctgattttctgagaatcctaagctgaattcccttctcctccagttctttattccacagtctgatgaatgtttccggatctttggactcatccacaggataagcaaataagttacctgtttttaaccctgcaagtgtgggggaacaatgacgaatcaaaaactgtgcaaattcatccatggtacccaatcaatactacactcctttcttttggttagttaaaactaacttataattaaaaaaatatacgctgctattgcctcgtcactgatgctgctatgtcaaccaattgttagttatgactaactttagtcctatcataagacattaagaaccatttgtcaatcaaaacgtgattcttaaattgagataatttatcttcaaaactcttgacaaaacacataaaaagtgtttatattaacatatgaacacttattcatatgttaataatatataattctattttgcgatatctataatggagggtaatactatgagtcatgaacataaacgaaacggattttcccaaaactacggctcagaacatgaacaccaggagcataatcacacggaatgcagctgtggacatgagcatcatgcgcataatcatgaggaatgcggctgcgatcattcacaccatgaacatgttgccccggagccatatgcgctttgtaccgtatgcggactgcccatggatgaatgtacctgctatctgtctcaaagcgcgcctgacaaacagatttatattttagaaaatctaggctgtgcaaactgtgcctctaagatggaggccagaatccgggagcttcctgaggttgaagacgccacaattatctatgctaccaaacagctcaggataactgctcaccagtcagaagaccttctccccaggctgcaggaaatttgttcatctattgagtctgaagtaacggttgtaccaagagccaaaggtacgaaagaagaaagtactgttatctttttggtagaaaatgttgactgcgcaaactgtgctgccaagatggaacagcgtatccgtgcgctgccaggagtatcttccgcgaccctgacctttgcgacaaaacagctaaaggtcacaggacagacgccactccgtcttctgtcccagattcaggatatctgcagttccattgaatccggcgttatcgtaacgtcccgggattctgccaacccccgccgggagatgactgcaaaaaaagcaaacgggaatctgaaagacgggattgaaataggcattggggctgttctttttgtggcaggactacttcttcagaattcctatgcctctgcctctgtggctgctctcttattatcctatgtggcattgggcggcagaatcgtactgactgcactgaaaaacctgagcaaaggccagatttttgatgaaaattttctaatgagtcttgccactctggctgctattgccatcgctgattataaagaagctgtgggtgttatgctcttttaccgcataggggagttatttgagcacatagcggtagagagaagcagaaatcaaattatggacgctgtggatatgcggccggaagtagtaaatcttgagatgggagacggcagcatccaggtgattcccgcccgggaagcacagccgggggatattctcctggtccgtcctggagacagaattcctctggatggcactgtagcggagggtgaaagcaggatcgacacttcaccggttaccggtgaacctgtgccggtaaaagccggacccggatctgaagtcatatccggatgtgtgaatacctcaggccagttgaagatacgggtggaaaaaccgctggaggagtccatggtaacccgtattctggactctgtggaaaatgcggccgcaagcaaacccaggattgacagatttatcacaaaattcgccagggtctataccccgttggtagtaggcctggccctgggaacggctgtgattccttccctgtttaccggtaactggaaccactggatttatacagcaattaccttcctggttatcagctgtccctgtgctctggtactcagtgttcccctcgcttttttctctggaatcggggccggttctaaaagaggaatcctcttcaagggaggtgtctccctggaggctatgaaaaatgtcaaagccatagttatggataaaacaggtaccattactaaggggaactttgtgctccaaaaggctgttcctcttggtgacttaacagaagacgaactgcttgccctttctgcaagctgtgaactttcttccactcaccccataggcacaagcatcaccaatgcggcatctgaaagaaacctttccgtggtccgcccggatgcggtaaaagaattatccggcaaggggatttgtgccgcactgcctcagggggaagtcctctgcggcaatcgaaaacttatggaagaataccatgtagatctgtccggttacgttaaggaagactacggtactgaagtgctaactgcattaaacggcaaactggcaggatatctgataattgcagataccataaaagaagaggcgaaggatgcgattcagtctctgaaaaaataccatattacaacagcaatgcttacaggagattccacaggaagcgcggaggctgtaggaaaagctaccggcatcgacgaggtgcatgccagactcctgccccaggataaactgacaaaactacaggaaatccgtaaaaagcacggaggcgtcatgtttgtcggagatggtatcaatgacgctccggttctggcaggcgctgatgtgggcgctgccatgggaagtggtgccgacgcggctatcgaggctgccgacgttgtgtttatgacctcttccatggaagcaattccccagtccatcgccattgccaaggctacgggaaccatagccatgcagaatgttgtatttgcccttgcagttaaaatacttgtcatgattctggggctggcaggcttcgccaacatgtggatggcagtatttgcggataccggtgttgctatgctctgtgtgttgaatgctattcgtatcctgtataaaaaataatatcacaattgcaaaaaacaggattttcctttacactaagtagtaaggaaaatcctgttctaattattgaaacgtatcaaaggagatacttatgagagtaaatgaaactaacaagcttgacgacaacattgaattatgcgaaggccaccatatacatccccatatttctccggatgagattccaggtgacgagattctttacagcctggctgatctgtataaggtctttggggaccctacccgaatccgcattctgtacgccctgtctacccaggagatgtgtgtctgtgatattgccgatctgcttggcatgacacaaagtgccatttcccaccagcttcgggtactgaagcagagccatctggtgaagttccgtcgggagggaaagactgtattctattccctggccgacgcacacgtttacaccatcctggcccaggggctggaacacgttaaagaatgagtgaaacgcattccggcccattggggtggatttatgtgagagtggatttaatgatggaataaacgtactccagtcattgccattgcaatgccatatttatcgcaggtctcgataacattgtcatctcttactgacccgcctgcctgggcgatgtaagctacaccgcttctgtgggctctttctatattatcaccaaatgggaagaaagcgtctgagccaagagcgaccccttccatcttcttcagccattcttttttctcttctctggtaaggggttcgggtttctctgtgaaaagatttttccagacaccgtctcccagaacatcctcatagtcatcggatatatatacatctattgcgttgtctctgtcagctcttctgattccttctttaaagggaagatttaacactttcggattctgccgtaagaaccagatatccgccttattgcctgcaagtctcgtacagtggattctggactgctgtccggcaccgattccaatggcctgtccgtcctttacatagcatacagaattggactgggtatattttaaagtgataagtgcaatcaaaagatctctttttgcttccttcggcatttcttttacctttgtaggaagattctgaagcatctcttctgttaccagaatattatttctcccctgttcaaaggtaattccgtatacatctttggtctcctgaggcgcaggaacataatcctggtccatctgaattaccacataagttccttttctcttgctctttagcaattccagcgccttcgcagagtaagagggggcaatcacgccgtctgaaacctcacgcattaggaaagaagcggtctgctcgtcgcactcgtcagagagagctacaaaatccccgtaagaagacattctgtcggaacctctggcacgaatataggcagtggccatctccgtaagctctattccctctacgaaatagatttttttcagggtatcatccagcggcacggcaatggctgcgcctgcaggactgacatgtttaaaagaagctgctgctaccatccctgtagcctcttttaattctttcaccagctgccagctgttgaaagcatctaaaaggttaataaaccccggcttgccgttcaggattttaataggcaggtcaccgccgtctttcataaaaatcttggctggcttctggttggggttacatccatactttaattctaattcattcatcttatctgcactcctttttctctaactatgtttcatagatatagaaaagagcctactatccgggctctttgcccagacggtcggctcattatcattatacttcatgtggttacttccacttccgtcagtcgtataactaaccttaaaatagcattttttccctcatccgtcaagaacttttttatagtttattatttaacaatcttgaactgccttcgctcaaaggacctccattctctggaaggcaatagagcctcctgttgcaatggcacctgttgcaatgagcacatagatcaaaaggccgaggagtccgccctggacccctgtgagggctgtaactactacgcagactgcaataccgatacacataatgatcccctggaacagcatctgaaatatctgtttgccaaaagctcccagaacatctcccagaagaacctcccccaaaatattaatatacagcttgttggcctgcagacatgcatagatgagaatataaagtactgctgtgagaggggaaaatcccataataataacaccgggaactgccagcagacacccgtctataagggaccgcacatgctcaatcgctgtggcgtaccacagttttctcacaggctgatccggaataaggtacgtatatggattcttcatttcctttgaccactttgtggcatacccgctgaaaataagcgtcaggtacgcccccaccccgggaatcacataatagcctttgatactgcccggggtccctgtcttgtagcaataatagccaatccccaggccccccagaaacgcaaataaggtataaaggttaaaaatgaaatacttgttctttttatattccagaagctgccggtaaaaaatggccctggcatatccgcctttataggttacgctggccttcctgtatcttgcctttgggcccggccctaccacatcccctgacttctttcgttttacggtttccatataatcatcggagaactttaccgcatcctcataatactctccggtacacttcatcctcctggcgcaaaccagcaagaggagtgctgcagctatataggcagcagaacaaataacgttcaccaccgtagggcccagcagcaaaagccgtatagctgccagattccacccgatcacaggaatgcataagagaaacgggtggcctaaaaagtcggtaatcaactgaaaagaaagctccttagtaaaaatcagaaaagcaccgaacaaaaccaagagtcccaggatgcaccagagggagcgggccagccaccgaagtgtattctctgataacttttcatttccatacaggagaatcaccagacttccttccagtatattttcaactataaaagaaaaaacaaaatacaaaaacatcttccagggaacaatatgaaaaaacaggatacccacaatcgaaaccgtcaggtagagtatgaatcccaggagatattgttttatctgcgtaaaccataagactagtttagggctggccggagaggtgaatacaaaatgtatgtcccctggtttaaatacgatcccctttcgctttgcataagtggcaaaacttgagggcattaagaatagtaccagaagggaaagcccggttacaaggccttccggagtgtctgcccctatacggccggcccattgaaccaaaaaactggcgatcatagtaacgtaagcgatgccgcctaccaggtacacataggtcacaggcctgcggagggcttttaagatacggttcttcgctgctgtcttatagagatagatcaatccttgcatatgcccttctccccttcagtaatcgtaaagaacagttcatcaatgtcacggtgtgccgcctcttcccgagtataggaggccaggattttccctttatccataacaaacataacctcccatatatcctttaccatctccagcatatgggtgctgatcaagatagttacgccatccctgctcagttcctgaatcacgtcctttagctctttgattgccttgggatccagacctaccataggctcatcaaaaagcattaccttgggctttaccgcaagggcacagcagatactcaccttctgcatcattcccttggacagctcatttcccaatttatccttcttatcctccagctcaaaccgggctaataaagcccctgtctcctcgtccgtgatgtccgactggtaagccctgcggatatattccagatgttctgcaacggtaagggcatcaaacatagcaggaatctccggaacatatccgaatactttctttgcctcaggggatcttcccggaaaattctgaatccggatctctccgtcatatctcaaaagccctgcaatgcttttaataatcgtagatttcccggctccgttcggccccagcaggataccgatactgccgtccggaactgagaagctgacatcatctaccgccagcgtctttctgtatttcttcgtcaaatgcattacttccagcatatattgtcccctctcttttgactgtcttattgtattataaatataatacaataagcctctgggaatgtcaaatatatatacgctctgttttacatatttctagtcaaaggcactcctgaattataaggtctgtgtacagtgacggaacctatcttcatcccctcctccaacagcccatatttgcagagtaccgcatacattttttcagccatagtaatatccatatcacacagcgggagcctgcagggacctgtttcaaatcccatggctctcattgcctgtttgaccggaatgggattgacatccaaaaataatgcctcaatcagctccaggtatcttagctgcaggttatcactctcgccgctgtttccccggaagtattcataacagatcttgtgggtatcctcagggatgatattagacagcacagaaatcactcccttcgctcccagagcaagcgcagatgtgatctggtcatcattacctgaatagatatccaggtcaccctgacagagcgcagctatcttggccatctgggagaagttgccgcttgcttccttcactgccacaatattgtccacctggctgagacgtttgtatgttgccgggaatatattaacgcctgtccttgagggcacattatataaaataatcggaagctttgtacacctggcacactctgtaaaatgcaggtacaagccttcctgggacgctttgttgtaatacggtgttacatgaagcagagcgtcggctccggccctttcacactgttttgaaagttctgccgcatgcctggtattgttgctgccagcccctgcgattacaggcagcctccctttcacctttttcaccgcatattttactaattctatatgctcctcatctgttaacgttgatccctctcctgtagtgcccgcaataataacggcatccgcgttctcttttatctgcctttccaataactccccaaagacctggaagttgacggaaccgtcctttttcatgggtgtaaccagtgcggtgcccacacctttaaatattgtgtttttcaagatatgtatcctcccttttttatttagtagaaattatacacatccggatactaaaattgtgtaaagagtaggctaacttatgttaatattatttaaaataaaaagggtcctgcagtccgcagaacccttttttccaattatttatacaatgccctgtgcattcatggcgtccactactttttcaaagcccgctatgtttgcgccaactacgtaattgccctcgaatccatacttcttggccgcatcagaaatgttgttagcaatacttgccataatgccctgcagcttctcatctacctcatcaaagctccagctcagccgctcgctgttctgagacatttccagtgcggaagtggcaacaccgcctgcgttggcagccttgcccggggcgaagattacgcctttttcctgtaaatattctgttgcttccattgtcgtaggcatattagcgccttcagccaccatgatgcagccattctctactaactgcttcgcatcctccagctgtaattcattctgagtcgcacaaggaagagccaggtcaaccttaacgctccataccccttttccctcatggtattctgcgcccggctttgcttttttgtattctgtcagccttgcacgccttacttccttgatgtctttcagcaaagcgacatcaattccttccggatcatagatccatcctgtggaatcactgcaggtaactacctttgctcccagctgatgagctttctgaatcgcatagattgccacatttccggaaccggatacagcagcagtcatacccttaatgtctttcccgttaagcttcaggatctcctttgtgagatacagcagcccataaccggtagcctctgttctggccagagaaccgccgtaggataagcccttgcctgtaagtaccccttcatacacgcctcggattctcttatactgtccgaacatataaccgatttccctggctcccgtaccgatatcaccggcaggaacgtcagtatccgctccgatatatttgcacagctctgtcataaagctctggcagaaagccataacttctctgtctgattttcctttgggatcaaaatcagatcctcctttgcctcccccgatgggaagtcctgtcaatgagttcttgaatatctgttcaaatcccagaaacttgataataccaagatttacggatgggtgcaggcgaagacctcccttataaggtccgattgcactgttaaattgtactctgtatccggtgttaacctgaacctgtcctttatcgtcaacccagggaacacggaatttaaactgtctttccggctcaacaagacgctctaacaatgcgtctttacggaatttttcttcgtttgcttctactacaactcttaaagattccagcacttcttttacggcctgatgaaattcaggttctgcgggattcttctgaacaacggcttcaattacctcatcaacgtatgacatgacttttcctcctagattataatacatttcaatactaaatttcgtccatattgtattatatatcggactgggaatatttgcaagtttttaattagaaacttgcaaatattcagcagaaaaaaagttgattttcttcgggttttgactcatcaatcctaattttatgcattttagcactatttgcctttccgcacacagcccttttagagatttttcctcacacggacttttgtccattttacatttttcattatcaatttatgcatttcggcaaacattttgtgcgtcatatctttcctaaaccgtaaggtttcttattaaaaatccactataatattttggttgtccatttggcgcagtcccacacatctgtcaccagcccctcataaaattcaggttcatggcagaccattagtatacttcccttatattccttcagtgcacgctttaattcttcttttgcgtctttatccagatgattggttggctcatccaaaagcagaatattggtttccctgtttaaaagcttgcagagacggactttcgcctgctcccctccactgagcactctcaccagactttcaatatgttttgtagtcagaccgcactttgcaagtgctgcccgtacctcatactgtgtataggaaggaaattcattccagatctcctggatgcaggtattggggttatccctgggcatctcttgttcaaaatatccaatttccaaataatcccccagatgaacctttccggaaagagggggaatcaaacccaggatacttttcagcagggttgttttcccaattccgtttgcccccgtcatggctatcttctgccctctctccacagccaaatccagaggtttggacagtggttcctcatacccaatcaccagttcctttgtctcgatgacaaaacggctgggagttctggccgtccggaagtaaaactccggcttgggcttctccctggcaagctcaatcagatccatcttgtccagttttttctgcctggacattgccatatttctggtggcaactctcgccttattcctggccacaaagtctttcagttcatggatctcctgctgctgtctgtggtatgcagcctccctctgtgcttttttcacttcataaacttccaggaacttatcataatctcccacatagcggttcagctcctgattatccatatgataaataaggttcaccacactgtttaggaaaggaatgtcatgggaaataaggataaatgcattctcatagtcctgcagatacctcttcagccagttgatatgaacctcatccagatagttcgtaggctcgtccaaaagcaggatatccggtttttccagaagcagcttcccaagcagcaccttcgtccgctgtccgccgctcagctccatcacatcccggtccaggccaatatcctccagtccaagagctctggcaatctcttctactttggaatcaattacataaaagtcgtgcattgtaagagtgtcctgaatggttcccagctcctccatcataacttccagttcttccggggaggcatctcccatgcagtcacagatttgattcatctgttcttccatttcaaacaaataagaaaacgccgactttagaacatctctgacagtcatccctttttcaagtgctgtgtgctgatccagataccctacccgtacgttcttggcccattcaatcttcccttcatccggtataagtttatctgtgataatattcataaaggtagattttccctctccattggcacctaccagccctatatgctcgcctttcagcagacggaacgaaacgtcctgaaagatggctctgtcaccaaacccatgggacagatgctgtacatttaaaatactcatctcttctccttagttcttccgggggctgctataccccctcttttttacaacccggacacccctggcatcctttatcgcccatcctgtcatccctcatatagtccagggcagaagtcagggcacagacagcatgcgcagagattccttcctggcttccggtaaagcccagtccctcctccgtggtggccttaatattgacctgattttcctccaaatgaagggcggcagccacatttgctgccatctgatctatgaagggcatcagcttgggcttctgtgcgataattgtggcatctatattattaatcacatacatctctttttccagaagagcgcctacttccttcagcagctttatgctggaaattcccttgtattggggatccgtatccgggaaatgtcttccgatatctctgagtgccgcagctcccaaaagagcatccataatagcatgcaccaccacatctgcatccgaatgccccaacaggcctttttcccagggtatctccaccccgcccaggatcagcctgcggccttctactaatttatgaacatcatagcccattcctactcgcatgattttcctcctgttctatcttccatttaatactgcaatcagctctatctttcctattattacccccgaagattatatcatactttattaaagggtggaaggcgggacaaatccaatggatatatatttcattatgcacgaaccatgtcattcaaactttgctgaagatgttccaggctggctttcgagatatcatagaccgccttttgagatgccagcaaatctaactgtcgtttgaaggaaagtatgtcagatgtaaaacggacatttggctttttgacataaaaggatccagcctcatcgcggcctaaagtggtctcctcattgcaaatccttagacaatagttcttttcgcttggtcaagattgtttcccccttctatcgttgaaattaggatagcatcttcagcaccgattgccatgccggaactattctatccgggcatggcaatcagcccccatggaatcctcactgtccacagccgccggcgtattttctctgatgcagtcgatgaaacgtttcccatatttgtcatatttaaacgttccaactcctgtaactgacaacattgcactctttgtctctggctttaaaacacacataagtgtcaatgttctatcagaaaaaacaatatatggcggtaccttctcctctctggcaatctttagtcttagctcccgcaatttctggaaaagctgctcgtctgcctcagtaaattcagcccctggcaatccggcagaagctccctttgccgttctcttccccttcttttccttcgtctggcgttcctgtactttagccatcttcatggtaatctgcacgttgcaggccagcacatcctccgatttttcggtcagcttgacaactgcatattcgtcattggtaactgcaagatactcatttagcagcaggtgattgataacctgtctcaatttatagacaggttcctttgccaatctcccgtaattaggatttccatccatccggtaattccggatttttgctgtatttgccccatgtaccgtgtcgataatcacgttcaccccatacctttgaccacagcttttaacacattccaccaagcaaagagctatctctgcgacatccacggtttcaaactgactgaggcagttagaacagtttccacagtaattttctccatattctccaaaataccttagtatatagtcccgcaggcagtcattggtaaaacaatagaacgtcattttccgcagccgttctctgtccctctcttgaacaatagccagagtaaccggatccagctcctggttatccgtattgttgtcaataaagaactggttcgtcactacgtctttgccgctgtaaagaagcagacattctgccggctccccatcccttccggctcttccggcctcctggtaataattttcaatgtttttcggcatattgtaatgtataacataacgcacattagacttatcaatccccattccaaaggcattggtggccaccataacgggagaccggtcatatataaaatcatcctggttttcccgccgctccttgtctccaaggcccgcatgataccgggtcaccggaattccgtctgatttcagccgctgacatacctcctccaccactttcctggtggcgcaatagataatgccgctgtcacttctgcgactatttacatagtcacgtaccacctgaaacttgtccttaggctgcagcactccgaaataaagattttttctatcaaaccctgtggtgagcacagtaggcgttatcagcataagtatatctataatgtcgtccctcacctctttcgttgcagtggcggtaaaggcagatatcaccggccgtttcggaagtttttctacaaattctacgattttcaaataacttggacggaaatcttgtccccattgagatacacagtgtgcctcatccaccgccaccatagaaatctctgcctccatggcaaaagtaagaaattcttccgtaagcagtcgctcaggcgcgacatagatgatcttatatctgttattcctggcgtaattcagcgccttataatattgattagcagtcagagaactattcagataagctgcgtggacacccaattggtttaaggctcccacctgatctttcatcagggagataagaggtgatattacaagagtaattcctggaaataaaagagccggaatctgataacagacagactttcccgctcccgtaggcatgatacccagcgtgtcctggcctcccagcacgctgtcaatcagcagttcctgaccttcccggaattcatcatagccaaaatactgcttcaatatatgatatttttcttcctgcagctgcaaattctatcctttccaaactcttctccgggaacttagcatcgctcccggagagaagctttatcctttgctgttgattctgttactctataatagaagtaatggtctcttccacctgtttcagatcttcatctgtaggaatatacatctgccggatagggtccaggagcatctggcagcccattccctccagcgcttcgtatacctgcttaatgctctgtccgccccagccataagatccaaaagcaattgctttcctttttttcggggccaggcctttcatatagcacaggaaacctgctactgtgggcatcatctgactattcagcgtaggggaaccaacggctatgtattctgcgtccagaagctccgtcataatatcggagatatgattatctttgagatcatacagatgagcccccactccagcctttgagaatccttccacgacagcaaaggccatcttttctgtggagtgccacatagaatcatagacaatacaggccttcttctttgttccgcctccggcaaattcttcatatttttccagaatgtctccgatatgctctgtccagataacgccatggctgggtgcaattacttccatatccagtccttttacaatctccagcgctttccttgcctgggcaccgtagggcataaggatattcgcgtaatattttttagcctctctgtatacatcatccaggttcacctgtgtgtcgaaccgcatattggatgcatagtgctgtccgaaggcatcattcgaaaacaaaatcttatcctccgggcaataggttaccatattatccggccagtgaagcatgggtgtggcaacaaaagtcagagttcttttgccaatcttcagggtatcccccgcttttactgtctgatatttgatttctttcccgtagtgggctgataatcccttcattccgttagggtctgaggtaatcacagtagcattgggcgctgcctttactacctgtggaagcgcacccgagtgatccatctcaacatgattggatattatgtaatcaattttctctggttccacaatctcacggatcctgtccaacagctcttttgcaaacggcgcttttacggtatcaatcagcgtaatcttttcatccattattaaataggcattatatgtggctccgctgttggtggagtatccgtggaagcttctcacattccagtccaccgctcccactgaatatatatccttttttacttctactacattcataatgtatggcctcctctgattcgtacttttaaacaattctaccccatattatacactatttctgccgtttcataaagtccggaataaaaaatgtgcccggagacatacgccccggacacacggttgtctgctatgcttctataaatacatcttttcccaatccgcacaccggacaaatccaatcctccggcagatcttcaaaaggggttcccggctcaattccgccgtccggatctcctacctccggatcatattcatagccgcagggttcacaaatatattttttcatatgtcttaacctcctaagaatcttgtaatatttttcgtattttttactgcttttatactatagcaaatattttcttgaatttctgttgcatttgcaacatacatcctctataataataaaaactttataaactaggaggttctttcatgaataccacagcaacagcactttttcaaaacatatccgatccggactgcaaaaaaatgttcgcctgtatgaagtcctatacggccgcctttcactcaggggacataatttacacctatggagggagccggcagtctgtgggaatcattcttcagggaaaagtctctgtggtccgctatgaatacagcggaagccggacaattctggaagaattggctcccggagatatcttcggggaagctcttgctttttatctcccggaatatgcctgcattactgctctctgtcagaaagactgccggattctctttcttgattatgaccacctgattcaaaactgtgcaaaagtatgcccctgccatacacaactgatacggaatatgctccgcctgttatcggaaaaatcacgtctcctcagtgaacggatcgaagttctgagccagcgttctatccggggaaagcttctgtgctttttccgccagcagtccgccaaataccagagcactgcttttaccctccccttttccatgatagactttgcagattttttgtctgtaaaccgaagtgccatggtaagagaaatcaaaaaaatgaaagaggaaggcatactagagatagaaaagcgtcggattacactcctgtcagacccgcaaactgcgtaaacaaaaagcacaccaggatccctgccgccgcaggtatcaggatagcagccccggtccaccgcagactttttgtttctttatatattgtcatgcaggtagtagaacagggccagtggagcagagaaaaaagcatggtactgacagcggttatccaggtccatccatgctctgtcagcagacttttcagaacggtcagatcttccatatcaacgagggtcccctgtgccagataggtcattataataataggcattacaatttcattagccggaagccccagaataaatgccatcaggattaccccgtccatccccagcatcttcccaaagggatccagaaaatccgtacagtagtacaacagagactgtccggacacctctgcattcgccaatacccaaatcagaactcctgcgggtgcagcaaaaaggactgccctccccagcacaaacagcgttttatcaaatatagaacggacgataacctttccaatctgtggtctccggtaaggaggcagctccagcgcaaaagaagacggaattccttttaatatggtttttgataagagtctggaaaccagcagcgtcataaagattcccagcagaatcatcccggcaagcagacatgcggacagaaaagagcttccaatcccgtagcttccccccacaaaaaacatggagataatagcaatcatcacaggcaatcttccgttacacggtacgaaattatttgtcaaaatcgcgatcagacgttccctgggcgaatcgataattctgcaccccacgactcctgcggcattgcacccaaaacccatacacattgtcagggcctgctttccgcacgcacagcatttcttaaagcaccgatccagattaaaggcgacccggggaagatatccaaaatcctccatcagtgtaaaaagcggaaagaaaattgccatggggggcagcatcactgatatgacccaggtaactacctggtacactccctgcacaagtatccccgacagaagcgaaggcgcaccggcatgctcaagcagatgcaaaagcttctctcctgcttccgtaaaccctgtgctgagaagacgggagggataattagcgccggaaatggtaagccagaaaatccccaaaagtaccaaaaacataattggaaatccggttgccttgctggtaaatagccaatccagcttccggtctctccctgcatacgaggaaccgctgtaccggaccgtttttcctgcaatctcttctgccttccgtacaaacactgccgccatatcatcctgcagctgttttacagtaatcccctgttcttccagttcccccagacattcttcccgggctcgggagaatacttcttcctcctccccggagaggcagaaatacttcttcacagaatccattaaactttcgtccccatccagcagtctggcacaaagccaccgtctctttctcttcagggagcagatatccacaccgttttctttgtccgaacctgttatcaacccacatgccgccgtttccagcttttccacgcacttttccacatactccgggtatctcaggactgtccgctcctgttccacttctgtcagcattttgccaagcagttcaaccatatgcgaaaggcctttgttggatctggctgttaccggtacgaccggaacctccaaaagctcctccaaaagggaaaagttaatggtgatcccctttttcccggcctcatccattagattaacacagaccatcactctgggacatatctcggtaatctgcagaaccaggttcaggtttcgctccaggcaggtagcatcgcacactaccacaactccatccggctcctcaaaacagataaagtccctggcaacctcctcttcctgggaatgggccataagagaataacaacctggaatatccacaagcagcccttctcccccgttcaacgaaaatgttcctcttgcattcaccactgtttttccaggccagtttcctgtgtgctgttttaatccggtaagctggttaaacacggtacttttccctacattcggatttcccgcaagcccaatcttccatctgttctcagcactcatagcttcttaccagtacacagttggaatcttcttttctaagggcaatcactgcacctctcaccagataagcggccggatcccccagaggactgattcccacacactccacacaggttccctgaatcagccccatatcctgaagcctcctgcgtaatctgtcctctgagtgcatctcacagacaataccagtctctccacgttccatcctatctaatggctttaaccctgtcatacattcgtcccctttcacatacatttagtattatgcaacaatgtttccatatcctaatatatgtttctacctacatttttgttacagggaggcacatcatggacaagtcaaatgatttctttacgctgaaagggtatgcacgcatggaaaaaagccagattacttcggcaatggaggattatctggaaatgatttaccgtatgcatcaggaaaaaagggacttaaggatcacagccctggctgaggccctgaatgtcaagccttcctctgcctccagaatggtaacgaatctggcacgccaggagcttgtgagctttgagaagtacggcatcatatccctgacagaaaaaggcgccagtcttggcgggtatcttctcttccgccatgagattcttcaccgcttcttctgctatcttaaccattcctcctgcgaattggagcaggttgaaaaggtagaacactttattgacagtcaaaccatatggaatatgaagctttttttggaaaaacaccaaaatgagcattaaaaagaggccatcttctcccgggaaaatggcccgcatgctttgcagcgctgaattagaaggtctgctctacaaatttcttcaccttctccagttcagcctcatcacagtcgtcttccagtgttatggttatcacatcaccctttttcacatttaatgtcatcagagccaccaattggtcggcgcttactgtattcccatcctttgtaatggtgacagccgtatccattccttttactaattcaaccaaaagacctaccggccttgcatggaatcccaattcatcactgattttatattgaaattctgtcatgttccttctcctctccaatcgttcctatggatagtaattgcttcctttgttccccaaactgacttctcccaagtaacctatattataccattacataggattcattgacaatcatctttttcaatacaatttttgttgcacctttttaacttctcttttatactggagacagaatattatatctgctgtactattataaattaaaagctatatgagggttgctatgttcaaaggaatggaatacgtatacgaagtttataaggaaaaaagcttttccaaggcagctgccaatctgtacatctcccagccatctctgagtgcaacaattaaaaaaatagaggagcgcgtgggcacccccctatttgaccgaagcaccaatcctattcagcttacagactgcgggaaagaatatgtaaaatgcatggagaagatcttggatatagaaaacggttttgaaaactacctgaatcatatgaatgaattgaaaaccggcagactttccatcggaggcagtaattttttcacctcttttgtgctccctcccatagtctccagatacatgcagaagtatcctttcattcaaatcagtctcattgaggccaacacctcccagttagaacagcagctgatatctggggcactggatcttgtcattgacaattatgcttttcatgaatccatctacacccgtcacttcctgtgcagagaacagcttcttctggcggtccccagacattttgcatccaacaaatctttcataaactgcaggctctccaaagaagacattgtgtccgaaaaacaccatctggagtcaaccccctgcgtccccctggaagcattccgggaggaccccttcatccttctgcgctcaggcaacgatacccgggaacgggccgataaaatctgcagcagccacggcttccgtccaagagtaatactaaagctggaccagcagctgtcggcatacaatgttgcctgttatggaatggggatagccttcgtaagcgataccctgatccggcacagcaggcccgacgagaatattatattctataagctacaggatcctgagactgtgaggaatgtttacttttatcataagcagagccggtatgtaaccagggcaatggaggagtttttaaaggtcgcatgtctttagctattccaggaatattgtctcccgccgatccactgcggatccaacaatcagcaatgccagcgacataaggctccccacaattacttccggaaccccaaagggattacccaatacagatttccacagtaccgacgataaaaatccgccgatcatccccatggtaattccaagcttctttgcccgtttggacaagagtgctgccatggcagggattgctatggctgaggcgaagtaagacattgataaaaccagtgactccagaatattctccattctcaaagcaaataccagggcaagaagtcctattacaaccaccgaatatctggacagcttcagctgggtctcctgttttactcccggatggattgccagaagcaagtcggtgcacagcgtctgggaagccagaagcagataactgtcaatggtagacattacaatggcaatcagggatgtaatcaccaaagcgtacagaataggcggaaaagattcttttaccatcaggggaatcagcatttcatgggagattccttttggaaaggacggatagagaatcaatgcacacacacctataatggtcacagcaaagctgtagaacaggatgattacattacctccaatcgctcccttgctggccaccttagaagatgaggaagcaaaggaacgctgccaatagggaggtccagccaaaaaatatagcaaatatacaaccgtataggatgcaatggatttgtcaaatttcaattcgaaataatgttccggaaggctggccgccagattggtcagccctcctactttactcaatgctgctgccggcagaattaccccgatgactacgatgagcagtattccctgaagggtatctgtataggcaaccccgtaaaatccggacagggtagtgtaggcgataacaattacagtggtgacgataagagctgtctgataggatatctcccagtcatctgccataaccatctgaaggatttttgaagaggcaaccatctgggttcctgcggtcccgataaccgtccagccaataatggctgaggctatcagggctggcaggcggccaaatcttttggtaatcagatccggtatggacagaatatgatacttctgccctattttctgaatgcgcccggcaaacagacagaataccgcaaaagcaattaccgtcgcaaatgtaggcagaatcgcagagattccaatctcatatgccagacctgattttcccagggtagaagacgcaccaatccaggtagccgcaaaggtcagcataatcacaggccatggaagattcctctgtccaagatagtaaccctccagattttttgattttttctgcagtacaatactgatggcagcagtggctgcaaaatagattattaataccgtaagtacaagaaccataaattgtatcacctgaccttttgtaagaatatttcgtttgcgtatttcagtacggatttatgcttttatgttcttctttcccatccggtttataataagtgcaaatacaatacccaacacagcgaagaggataatcgctccgaatacgaacttaaatcctgcagctcccggattgctgtcaatcagtttgccgagtatcagattcatatatgcgtccggcaggaaaccgatggcacagataatacccgttgcagttccggtaaattcttttggaaccccggcctcccccatagttgcaaagtaaattccacggattgcatacataaccgtcgcaaatgcgatcactgtcacaatggcaggtatcagcatacttgattttcccggaataaccaggaggagtgctgcaaaaacaatctctactacaaataatcccataaccattttagaataagagctggttttgtctgcgattttacccataataggcgcgctgaatataccaattccgtagcttcggatggtagccacgatcccggctgtaacggtggtcattccgaatatagttgtcaggtatgtagttgtatattctgatgcaacctgggcgctgtaagcacacattacaaggagagccacaatccagatccccgggatctttaacactttgacatagtcggcaaaggttgcagatgtgcgtgcttcttctttgctctttttgggaagaaggagccacatagcgatggtcagtaaagtgtaaacaataccgtagaacagcaaaacgtaacgaagaggctgagccgttgtgacaaagtgattaaacactgccagagctgcaaaattaatcagaacgcctgccgcggcgcggattccctcactatagccaaagatagaaccctgctcattgtcatccgcaagaatacggatggcctttactgctgatacccaaaatactacattcgaaaatgcaagtaaaaactggattgccataagtcctgtcagagatggaatcgtcgcataccagaaggtcagcgccgccagcatcaggttggatccaaccagcatcttgcggttgtcaaaacgatctgcaagaatacctccggggatatagataatcattttcgtaattgagtaaacactcatgatagttcctacttgtgtgttggtcagcttaaattcttccaccaacgcatcgtaaaacacggttttcaaatatgggacacggtaaatcagacccgctgatatagtaaccacaaaaaatgcaatccatttgtgttgcttattcgtatttcccatctacatacctccttgggttcttgtactattgctctttaataaccaaagcatccgcaagtgcaaccccttctccttcggggtacacaaacagtgggttgatatccagttcctttaaggattccttctgggcaaccgcatattcggaaatcttaacaataaattttgccagagcatccacatcacattttttactgccccggtatccgttcaacagcttatagcctttcagagattctatcatgcttctagcttcctgttcattcagaggcgcaggataaagacttacatctttaaaaacctccacaaagacgcccccgagcccgcacagaatcattggtccgaactggggatccgcatttaccccgatgatcatctccactccctggggaagcatggactgaaccaatacaccgtcgattctggcgtccggacatttctcctttacactttccataatctcctggtaggcagtctccagctccccggcatcttggagattcagcttcactccccccacatcactcttatgcagaatatccggagatgcaattttagccacagccggataagaaatgcctggggcaaagtctcttagttcctcctttgagcttacaatagcttccggagggacaggtacccctgccgctgccagttcgcatttgctgtcatgttcgcttaacgctgtcctgactttttctttcttctgattctccagtattgccaaatctaaaatatgttcttccggtttatatttcacaaaatccatgagatatttcagaagcttgaagccgcagcctgtggctggcaggataggaactcctgctgcttccagcttttcacgtaccatcttatccctggatgagttaaagaaactcataaccgcaacaggtttcttctttttgccggctgcaatcaccatgccgtctgacatgggctgaatcacgtctttcggaccgtgctccgggagaatcgtctggccgcacaataccatccctatcgagggatcttccataatggcctgaatgactgccgcatacttttctccgtcatgggccagggtggcagacatgtccagagggttggccggtgtggcataatccggcagaagctctcttagcttctccattgtctcaggagcaaattcaggatattccagccccagcagagttcctgtatctgcgcacactccagtctctccccctgaaagacacatggccgaaagtcctgtattctccggaatcataggcagtacactgagcatatggcacatctgtaccaattcctcaatatcatccacacgaatcacaccgaattttttaacaattgcatcaaacgctttgtctgatcctgcgagactgcctgtatgagaagccgccagagcactcccctttgaggtttttcctaccttcaggataaccaccggctttctggccagagctgcctgcttcagaacctctttgaattttacaggatctttaattccttccatataaaggccgatcactttggtatcttcatcttttatgaggaactccagataatcctcaatgcggatacaggtgctgttcccgctggagataagataggaaaaattcatataggtaatctgcatcatattcaggcagatttttcccgactgggatataatggccacatttccctttctcgcctcaccaggcaccagcattccaaaggcaaagatttcgtccagattgttgatgaatccggcacagtttacccccataaccgccatatcgagttttctgcagagctcccgaagctggccttcgctttccttgtcaccggtttctccatacccgctggcgtagacaaccgccgccttacatccgtattcagctgcctcctcaagggctgacggcactacttttttattcacaatgagcacgcacatgtctattttttcagggatttcccctatacttttataacatttttttcccagaacttcctctcttttgggatgaacgaaataaacatgctcttttatctttgttttcagcagattgctgcaggtggacagcccgaatccgggcttgtccgttgctccaatcacagcaatacttctagggcgcagtaattttgtcagttccataggctcactcctttgctacatagtcataacctgcctgaaatgccgcaagattactctcatggaactgtggcttcttcgcaaagtaatgtttgattccttcttcatagcattctttgccaaaaaggtctgtacatgccgccagagccccgataatgcagatattcgttcctctggaataagaaatcttttcacatacctccgtggccggaatttccactaccctgatgtctccttttctaggtacatcctttacaatagaagaattaaccaggataatcccgtcgtctttcatctgaggcagaaacttgtctatagaaggctgattcatggcaactaaaatatctatcttcttgacaaaaggactgccgatcagctcatcactgattttaacggtacaattggctgttcccccgcgcatctccgcaccgtaagaaggaatccaggtgacctctttatcctgcatcgccccgatatgagcgataatcagacctgttgtcagaataccctgacctccgaaacctgcaaatataaattgtttctccattactggtcacctccctttgcaaattcacccagaggataatactggataacttcttccccgattcttctcatagattcctccggtgtcatatgccagtttgtgggacatggggaaagtatctcaacacaggagtagccttcgcctgccatctgagcggtaaacgcctttttgatataagattttgccttcataatatgcggggcatcatgaatagatcctctagccatataagcaggttcaaagcttttcagcacttccataagattcagaggcatgccggatacttcagggtctcttcctttcacagaggtagttgttttctgtcccacaagagtggtcggcgacatctgccctcctgtcattccgtaaacgccgttatttacaataatctgggtgattttctcttttctctgcgcggtatagatcgtctctgcgataccgatagaggcagcatccccgtccccctggtaggtaagaaccagcttttcaggtctgcagcgcttaatggcggcggctgccgcggaggccctgccgtgaggagactgcagcagatcaatggcaagtgtccggtttgtcagacagctgcacccaactgccaatacgccaatggtatccctgtctatatccatttcatcaatcacttccgcaatgagccgcaatacaagtccgtggccgcatcccgggcagaagctgtttgccgcataaatacttcttggtatttctctctcttttactgctgccatttagaatgcctcctttcttgttccggcacggatttcgtctacaatccggagaatctcttcctgatcagcgataactctgccggagggataagcgtataccggtgtcccctgtgcataaagagctacatcttccaccatctgtccgcaagcattcatctcaacggccagataagcttgtacggttttgtttgtcttgtgaagcgctttcttcgggaacggccaaagagtgatgggacggatcattcccagcttcaccccatttgccctggctgcctttacagcgccccggcatactctggatgtgatgccataggctacaagaataatctccgcatcctcggtctccacttcctcccacatttgttcattctcctccatggcagaataacggtcgcggatatggggatcatactctgtatatttaaagtcatagtaaatccggtcagtcatctttcttccgttgggatacgtatcatcttttcccttcagcgtccactcaaatttattgggatcgtgctcttttccctcagggagctttacggattctgccatctgtccgatggcgccgtcgctgagtatgataacaggtgttctgtattcctctgccttgtcaaaagcaagaatggtgtaatccacattttcctgtacggaagaaggtgcataaactaaggtcttataaccgccgtgtcctccgcctttaactgcctggaaataatccccctgtcccagagtaatatttcccagaccgatgccgtagcgcataacatctacaatgactgcaggcagctccatagaagatatgtaggagattccctcctgcttcaggctgaatcccggtcccgaagaacttgtcatagcccggaatcccgttgccgctgcacccagcaccatattaatgcctgccagctctgattccgtctgcacaaactgccctcccacttccggcagcctggttgagagatattccagaatctctgtctgaggtgtgatgggatagccggcaaagaaccggcagcctgctaaaatagcagcctcagccaaagcattattccccttcattaatgttctcatgccggttgcacctcctcatttttgattgttattacataatcaggacataccgtatagcagattccgcatccgatacatttatcctggtctacttccaccactgcgtaccccttgccgttgatttccgaagacacggacagcgccccctgtttgcacgcccggatacaataaccgcaggatttgcagttttccttttttatgacaaccataattaccttctcctttcctgcagcccgcctgtccgccttgcggggacagaccggctgctgtttgcctgccggttaactagcactccggctcgtcctgggtgtctggttcgaatatttccagagcaatatctctttgatatctgcctgtggcttttgaaatctcgaagattttagcaacatttcttctgcagagtgcatcaatatcatgaattacattttctgcggtaggttcgatcactccaaaggtgatggtgtagaagaaacgtacagcacccagatttgcaatgaagtcaggtacaatctgaattcctctttcatgaaggcccggatctgcggaagcggctaccggaatatttgcgccttcacagataagctttgcctttactttatctacattgctgccgttgatgacatcttccagagctactggaaccaagatatcacagggcacatccatccatgcggagttcggcattacctcccaggaaggatcgaatttagactggtccatctcgcctctcggcagaacgtttgctataagactttctacgtccaaaccatccttgcagtatacaaagcagtttgcatctgcaatacccacgatcttataacccagcttatgaagcctgtgggtacagctgagacctacacatccaaatccctggattacaacggaagctccgggttctccgcccatctgtttccatgcctcatctcctgaaacagcaacaccgtatccggtggtcaggtcattgagcaggaatccgtcgtagtggctctgcaggagttttcttacattttcctggcctttagctataataggattatttctcatagactttgtcatgggacgtcccattcccagctcatcgaagatccggtatacgtcctcatacttcgtccccaggtcagaacccattgccagtcctgcatcgatgtatggcctcatggcaatgataaatctttttaacacatcaacagcatccggtgctttgtagtcatatacgattccggcctttgcaccgccctgccaggtattctcgcaggctttccttttgtaggccattgcctctgccagacgaattacctcttctctcgtcactgtgggatgcattctgattccgcctccggaatacccttttgccagattaaacacacataaccaacccttagcgtctgtttttgtatcgttccactcaattaaaatataaggtctcatacccaatcctcctattgttttttctcctgttctattgcatgtattggccaattctattgcaaaagaagcaatttcaggctataatattagaaaatagcataaatggaaaaacttttttctaacatctatccccatgtgagacattatatcaatttttactcatttttcaacattttagctcttacttttgtggatagtatctaaaataaaaacgcactgtctatgaggaggaagttaaaaatgtttaatgaacccgtgatttttggccgttttctggtgaactcaacccaaggccgggaatactttgagatttacaaaaaaatttctcccgacagcaatcagtacaagtgtattgaacgcactcatactgccctgggacaacattttctggattttttagaatacagcgatgaggcactgccccccattgtatcccactacaataaagtcttcaaatatctggataaagattacctggaccagaaaaaaatacatactacaatgggatttattcacgatatttataatagtttatccgcggttcatcccttttggaaatccactttttatctaaatccggtactatcaaactacaaatggtatgagttctattacttcagggagtatatgaattacgacgcttcagatatgacagaggcggacagggacagcaaaatgcagcattactgggatcaggtacgaagaagcattatgcatgagctgaaggaactggaagagtttctgaacttcatctcctctatgcgaaatgccgttaccttctgcctggattactccagctttccggaattttctaaactgcacacacagcagagagcatacctgtaccagtcacattttgattcaaattttatgcggaatcagacaatccagagcatctttaacctgagcgaccgggccagcgccatggatccggaccgtctgatctccttctctgacaacaacgaagttatggtaagcagtatcatatccaacgcaaattattacgagctgatcaaaaaatcgaagacagcactggatttctcagcattagctgcttccgtagaaaaaacatccattgaaaccactacgaatctggatattacaaccctggaggacatcagcaccatctgtctctatactttttctcttttggtttccaataatgttcacgtaaggccctgcaaaaactgcgggaggctcttctccccgtataaccgaaaggatgaactctattgttccaggatacaggcgaattctaaaacctgccgggaggattactacgacaaacagatacataccgatgaattgattcgctattaccgtactgcatacaaaagggaaaatgcgagaaaacagagaaatattgtgaacaaaccatcctctgaaaaggagtttattcagtggacaaaaaaggcaaaaaaagcattggaaaaagcaaaaaaaggtgatatttctttcgaagaattcaagaaaatattagatcgggaggggtgattcatttgataatcacccctaataacttagctaattctactgcctgatatgggtttataatggctccttttagttcagaaagttcctccgatacagtgattctgtctatagtacattcagtaaaatcaatgcccttcaatggagttttgaagaaggatgccagggtaaaatctgtacgaaaaacctgaatatccttcattttacaggcggtaatattcccatgttccatactcgtttcacagatagaaacatgatcaaatctgcaggaatccaggttagaaagtttaaaattcccatccgtaatttctgtatgtttcagcacagaatgatgtaaatttacccccatccatttccctcctattatcctgcatcgatgaaaatatgcatcggtaaaattgctgtttgagaaatcacaattcagaaaaataacgtctaaaaaactagttctttcaaacaaacaattcatgaaatgacagtttttaaacacaacttttgcaaatgaaattctgctgaaatcttcttcttcctcccagacatcttcgatacttttttcaagaatatctgtctcttcctcctttgcccgcatcatctggtttttaaaatctgttcccagagactccagcatttcaggtaaacagggtggattaagcctcatcttttctctcctttccgcgcacacctccttttttatgccatatgctagtaaaaaaggagtattctatgctatgttaaaaaaatttattactgtttttttctgctttttactgctgctgccctgctgttctcttgtatccgtcgctgcgctccctccctcatcggatacccacgagggcattgatgtaagtatgtatcagggcgatattgattttgaacaagtggctgactccggcattgaaggcgtatatattcgctccagcctgggcagttcctatatagatccatacttcgagcaaaattattccaacgcaaaagctgcaggcttgtccgttggtttttatcactatgtcactgcccgcacagtctctcaggctgcctaccaggctcatttttttgtaaatactatacagggcaaggactttgactatcggctggccatggattttgaagatctgcaggggctttctgtctctgaaatcaatgatatcgccttaacctttattcagactctggaggagatcggcggcagggaggctgttgtatacagcaatgcctacgacgccacagatatatttcagggggaaatcacttcctatcccctctgggtggcagaatacggggtcagcaccccaagagattccgtaaactgggattcctgggccggatggcagtatacctcccgtggacagatttctggtatacagggatatgtagacagagacttgtatacggaagagatgtacttaagcagctccggacaggtaactccccacccggcaatgcctccctccagaaccaccaatgccatctatacggtaaagccaggcaatactctatgggggattgcaagactttatcataccacaatctcatccattgtggaagaaaaccaaatcagcaatcctaacctcatcttccccggagaggttcttcgaataccggtggaggatcgttcttccacagaatctgcaagcatcagatacacggtgcgaaggggcgatactctctggggaatcgcacagagataccgcactaccgtcgcacagattgcagcgctgaaccacattgccaatcccaatctcatctatccggggcagcagctggaaatccctgagcggaattattcggctgccgtctatacggtgcaaagaggagatactctatggggcattgcgcagagatacggaaccacagtttcatacctggcagacctaaatggaattagtaatcctaatctcatttatccgggccaggtgctccaagttccttaacagtcagagcaacccgacggtcacaaccggaattccctgaggggctttacgcctccggggatgccggttttttcctgcagatacgcctcacagcctctccaacctcacaaaccctcttctccataaattcaggatgttttagaaaccatctcctgttggctggagatggatggggcagtacaaaggtctgtctgccgtttatctccagatcccggaaaaccagttcagaaaaattttctttcggaaaaaaataagctgccgcacatccgccaatcaaaatgtacagttcattattgaccagttccatctcttttccaagccagagatccgcacatttcctgggcggttttctgtcacttcccccaggtgtctttcccggatagcagcggccgattgacgcgatataaaaattatagggatcataaaacatctcatcagaaatctgataccactcccggcggagcttcactccgctggcatcgttaaagggtctttgggtctgataaaccttcagggaaggggcctggctgatttgcataatccttgcgtcaatgtttccccagataacagggctggggtccagacgatcccggcaggccttacaagcctttacactttccagtaactcttcatatgcttcccttctggaaatcatattattatccataactaatcctctctcaatcttataatgaaagcagtgcgctaacgttagtatctcatagctgtgcgggaaaaagggacaggtccattttaaaatgggacaggccgatcttaaattgggacgtgttcttcctagaaagaacacgtccccaattctataccgcctccgccttttcaaactggctgttgtagagattttcataaaatccgcccttcgccagcaattcctcatgtgttccctgttcgatgatatctccgtccctcatgaccagaatcaaatctgcgtcacggatggtcgagagcctgtgggcgattataaagctggttcttccccgcatgagattatccatggccttttgaattctcacctctgtgcgggtatctacagatgatgtggcctcgtctaggatcaatatcttattgtccgcaaggattgttctcgcgatggtcaacagctgcttctgcccctgagaaatattactggtttcctcatccagaatggtctgatagccatctggctgggccatgataaatctgtgtgcatgtgccgcttttgcagcttctattacttcttcatcggtagcatccaggcgtccgtatcggatgttctccagtatggttccgttgaaaagccaagtatcctgaagaaccatgccaaaaagctctctcagctcacttctgttgaagtccttgatgttgtggccgtcaaccttaatctcacccgtattcacgtcataaaaacgcataagaagttttaccatagtggtttttcctgccccggtaggacccacaattgccaccttctggcctgattttatatctgcagagaagtcgtgtataatgatttgctccggatgatagccgaaggatacgtgatcaaattcaacatttccctcaacatctgcaatatctgcaggctgatctactgtctggtcttcctcctcttcctccagaaattcgaagacacgttccgacgccgctgcagatgactgaagcatattggttacctgtgcaatctgctgtacaggctgcgtaaagtttctgatatactggaagaatgcctgcacatctcctacttcaatacttcccttgatggtaagaaaacctcccaaaagggcgaccataacataccccagattaccaacaaactgcataataggcatcatcattccggagaaaaactgagatttccacgctgagtcatacagtttatcatttgtcttttcaaattcatctaccacagcatcttctttgttaaataccttcaccacattttggccgctgtaaatctcctctacctgaccgtttacttctcccagatatctctgctgcgcctggaaatatttctgtgaatgcttcatcacttttcctataatcatcatagacaccggcagaatcagcagggctgcacaagtcatccagatattaatgctaagcatcataatcagcgcgcccagcagagtagtcactgaagtaataagctgggtaatactctggttgaggctcatctgcagtgtatctacatcattagttaccctggatagaatctctccgtgggtacggctttcaaagtatttcatagggatccggttaatcttctgagagatctcttttcgaaggcagtacgtgacatcgttggatatccctgacatgacatagccctgtacaaaagagaagacagaactcaccgcatacagacagagtactgtggccagtatggttcctattttgctgaaatcaatggcgccggtcccgttgatttttcccatcaggccgttcatcagttccgttgtggctttacccagaatcttcggtcccactatattaaaaatagttccgcccaccgcaaataccagcataatgaagatacggattttataccgcttcatataattcatcagtttcttcatggtgcctttaaagtcctttgccttttctcccggcaccattttgccgtgtccccccatggggcctcttcttggattactcattggctaattcctcctctgacagctgagacatggcgatttgcttatatacgtcacaggtttttaataactctttatgggtaccctgacctgcaatacatccatcgtccagtacgataatattgtctgcatgcagaatggtactgattctctgtgctacaatcagtgttgtagcgtcctttgtttcttttttcagtgcttttcgaagaacaacatccgtcttgtagtccagcgctgaaaaactgtcgtcgaagatataaatctccggctcttttgcaatagctctggctatggaaagacgctgcttctgcccgcctgatacattggttcccccctgagcaataggagaatccaacttttcctccttctcactgataaagtcccaggcctgtgcaatctctgcagccctctgtacttccgcctccgtagcctcttctcttccgtatctgatattagaatctatggttcctgagaaaagcactcccttctgtggaacgtatcccagcttccctctcagctccttaagggacagtctgcggacatccacgccgtccacggttatacttccctctgtcacatcgaaaaagcgggggataagattcaccagagtacttttgccgctgccggtgctgccgataaaggcaaccgtctgcccctttttagcggtaaaggaaatatcgttcagaactttttcttctgcccccggatattcaaaggatacatggtcaaataccacttcaccctttctgtcctccaaagtatgttccggctgcatgggatccttgattgacacctctgttcccagaacttcattgatacgctttgccgcaacattggcacggggtatcataatagacatcatggtaatcattaaaaatgccataataatctgcatggcatactgcataaatgccataatatttcccacctgcatagtgcctgcatccactgcatgagccccgttatatacgattaggaccgtaacaccattcataatcagcatcataatgggcatcataaacgtcatacaccggttgacaaaaagattcgttctggtcagctccagatttgccttttcaaaacgttcttcctcgtgcttttctgtactgaatgcacgaatgacaggaatccccgtcaaaatctctctggttaccagattcagcctgtcaattaaagtctgcagtttggtaaatctgggcattgcaatcttaaacagcagtcccacaacgatcacaattaaaaccacagcaatccccagaatccaagtcatatctgcatcggactgcaggaccttcagcacgcctcccattcccaaaataggagcatagagcacaattcggaacagcatagtcataaccatctgaatctgctgtatgtcattggtgctgcgggtaatcaaagatgccgtagagaactggttcatctcccttcccgagaaagagataacctttctgtaaacatgatttctcagattcctgcccagccctgcggctacccggcaggataaaaaggtgacgcagatagcagcagccatccccagaagcgccagacccagcatcttcaggcctgacataagtacataccggatctgcatctgacccacatctttgcccatggcatcatactcatcctgcacaaatacaacagcagtctgggtaacaatcgattccggcattttttcaaacttatccgccatagctcccatcatctgtttcagctgctcttttggcatctgggacaaagcctgaaagatatctgcctcctcccccagtcccatctgagactttacagcctttacctcatccgtatctccggagagtcctgtgacagcaagcataggaacaccgaatatgttatttagcttctctctcttctcttcgctgatatttttcaaacggaaaataccgtcttttagctcataagactcagcaactgtcttctgatctgtatcatccataaataaatataatttatccatggtttcttccctgatttcttccggaactgcatcttccacacctttttgctgaatcccaatatttacaatcttagaagtataatccggcagggataaatcgcataccgcctgaaggaaaagcagggcaacaatcaagacaatataatgccacttatccttcaggtatcgaaacatcttcaacatatctttattcctttccgcacataaaatctgtttttatggtgtcatctacaggtagtctttccagattctcttctatctgcttaaaaaaacgggcgaacagacacttctcactctctgtaaacccctgaaaaagaattttttcattgttttgtatctgtttcattgctgtcctgtagatatggtatcctttttctgtcaggcttactcttgtaactctctgatccctggcgtcaggctttcgctcaatcagacctgacttctccagacgcttaatggaaactgccacagtcggaggctttatatgaagagattgtgagatctccttctggcttagctctcccttatatcccaataacttaataatagggatttgtccgggatgtattccgatcccatccatctgctgatagatttttgtaaaatagagatgtgagatccttaaaagcatcctctgcaggttattatccagagtatcctgttcctccatttttccacctccttatcatatgcacatcctttatatttgttagccgactaacatataatagacctatttttaccgatatgcaacagaaaaatcttttatttacactttttttataaaaaagcatgttttattaattagacaactaaataaaagcatgcccggaaccatattatttatggttccgcacatgcctttgagagcgacggccagaccgtgcacaacatagttacaaaacaggcagttcctcccaaaaaatttgagacaggctctgccagaaaaacacccatggcccccagatttcccacatatgggaggagaatcgtcagagggattacgattactgcctttcgcaaaagcgaaaagaaaattgcctgctttgcttttcccagcccagtaaagactgactgcccggaaaattggagagacataaaacaaaagccaaaaaagtatacctgcatagccgggattcccagtgaaaacatagcctcgctcccgttaaaaaggcggatgaatccccccggaagcagaagcgtaatcccccacattacggtagtataaacaatacaggtgacagacataaacttgattcctgatttcactctctgatactttcccgctccgaaattataacccagtacgggctgcgccccctgggtaaagcccatcacaggcactgtcagtatctcccgcacagaattgataattgtcataactcctacatagacatctccgccgtgagcctggagggtgatattgcacaccacctgaaccgcacagtttgtaaaggacatacagaagccggacagaccgagccccacaatctcctttaccatggtgaggcgcagccggagatttggaatccggagctttaaaagcgtcttctttccagtgaggaatctcagcacccaggctgccgatacaaactgtgacagcactgtggcaatggcagcaccctccaccccaaggtgaaagacgaagataaacaaaggatccaaaataatattcagcaccgcccctaccagaactgtccccattccaatctccgcaaatccctgggaattaatgaatccattcatccccaggcttatcataacaaatacactgcccagcagatagattttggtatacgcatccgcatatgggaatgtgatgtcactggccccaaacgcatacaacaccggttttttcacgagaaggcatattactgtaaggagaattccggtgattaccagaagcgagaacgtatttccaatgatctcctctgccttcccctcctctttatgtcccctggcaatggagcaaagcggcgctcccccgcttccatagagatttgcaaaagctgtgactcctgtgatgataggaaatgccacccccactcctgtaagagccagggggcccgcctgaggaatcctgcctatgtacattcggtcaattacattgtagagcatgttaataaactgcgccagcgtcataggaatggccagcctgagtatattgcccgccacacttccccgggtaaaatcatgctcctctgttttaaataatcctttcatagttcaaccttccagcaagtattctatatactattatactcttttatggaaaatttacaatttgctcttatgcagacctataaaaagacgtccctgaaacaggatttctgtttccggacgcctctcttttcatttattttatttatggattgacaacgtttacactttctccagctaaaaatgctttcagattttccacagctatatccatcagccgctgtctgctctctttgggagcccaggatatatgaggggtgataatacaatttttcgccttcagcagggggttatccccttgaatcggttccgcagacaccacgtcaagccctgccgcatatactttgcctgaattcagcgcatctgcaagatcctcttccacaatcagaggccccctggaattattaagaataatcacgccgtccttcatcttagcaatattttctttattgatcattccctcagttgacgggaacagcggacagtggagtgcaatcacatctgattcctcaaaaagctgctctctgggcacatattccgcaagctcttttccgctggcattgggatattcatcgttggcaatgacccgcatccccaaggctttggcaatacgtccggtagcctgtccgatacgcccgaatccaatgatccccatggtcttgtctgccagttcaatcagagggtaatcccagaaacaccagtccggattgctttcccaacggccttcatggactgcatcactgtgatgtgccacatgatggcagatctccagaagcatagcaattgcgaactgacctacggcagcggtcccgtaagtaggaatattgcacacagggatccctctctttctgcaggcatccacatccactacgttatatcctgtagccagcactccgatatagcggatatgtccgcactgatttaaggtttcttctgtaatgggaaccttattcagaattacaatctctgcatccccgatgcggcttacaatctcttccggagcagtgcggtcatataccgtaacctcccccagtgcttcaaacccttcccagctcaaatcccctggattctctgtgtaaccatctaatataacaattttcatatctttccctcatttcccggagaaacagtcaaaactttttgccggtgcttccccgcgttaagttatccagtcttttccttagaatcaaatatctcctggcagcgctcccacggcttctgctatatagtaattcccactctatataagtcctttatttggggatatagtctcgtataaaccgtatactgcttctcatacacctcatcatgtttccggctgctgattacttccttgtaaacctttttctctaccttttcagaggcttcatagatattctgaaacacgcccgcacccacacccgccaggagtgctgcgccgatgggagccatatcatttatatccaaaatctttatgttcctgccggttatgtctgctttaatctgagcccacacctcactttttgcacctccgcctatggaagagaattctgtaatctttctcccggtcaccttctctgcaatttctgccatttgacgcaggccgtatccacagccttccataatagccctgttcatttcttttctggttgtatgaagagagattccgaaaaacacccctcttgcaaagggatcccagatagggcttctctcacccatcatgtagggcaggaaaacgaccccgtcacatccgggattcgcccgggatgcctcctcattcatcatatcaaaagcttttttagaacttcccgatgccttttctagcagatcctggcaaaactcatcccggaaccactgataggaagcaccagtatgggacatagcaccctgatagatccaggttccctccacaacgtgacatcggttgataaagcttctgtcgaatttaggctcgtccacacagatagtgagcacgttggtggtaccgacggattcacacacatccccgcctttggtcacccccgccgccagagtcgcacagggggtatctgcacctccaatcactacaggcgttcccgcgggaatccccagttctattaacgcggcctcattcagccctcccacaacatcggtggaacccatgaggggcggaagcttatccattgaaattccaatcctgtcgcagaggaacccggaccatttcagccccccggtcgtctcgaagagagccgtgtaggaagcgttcgaataatcaatggcgaattttccggtcatcttaaaggccatcaaagtattcacatggccaaaatactttgttttctcatagatgtccgcaagattccttttgatccataacatggaagttccggaaatcgctccggccatagctgtattgcctgtaatctcaaacagtctgtcctcgccaacggctgcctttataatctctgcttcctctgtgcttcttctgtcggaatagataatgggatccacaagaatcttcccattttcaccaatggctgccagaccagggcacagactggaaatactgatgcctgcaatcttggagggctcaatttccttttcttcaaacagaagccgcaggcatttcaaataagactgccacatatcttccgtgtctatctgtgcatactcctgatttggtgtaatcatccggtaggggctgctgctgatccccagcacctttgcattttcatctataacagctacttttatgctagttgtacccacatcaaccccgagcaacaatctgccttccatatatacacctgcctatgctttctatcttactttatggtttattctaacttaccgcagccgtggtactgttagattttcttagaactgatcgtagtttttgtcattttccaactgagccagcagttcttttgcttcttttacactgtatccttcatgaataatgtatctcagcgcaatcacaagggctgtgatatccggataatcccatacgaatcttcccatggtaactccacctaccccgcagtccatcgcttctcttgtcatattcaggtagtcatctaaggtcttacaagcatctccgccttgaatcacgactcttgccggacagcagtcaactacttttgccatagtatcgggatctcccgtgtaagttgttttaataatatcaattcctaattccgcagcgcttctgcagcagtatgcaatattttcccaggcagtctgctgatctttgggaacagattcccctttaggataaacatgtccgattaaaggcattccttttctcatacattcttcagaaaatcttccaatctcttcaaactgaacatcctggaagtcccccagtgtcatagccccgatggagacagcatccgcacccatgcggatagcctcatctacagtgccgaacgcaatatcttttgttggatgcacaggtgaatagctggagcattttaataagatagaagtctcccccgcatgttcccacatgcagtgttccgcgatcccctttgtcatggtcatagcattcggtctgccggcaacaattttattgatggtatcctgaatgggctgcaggcctttcatgggagcaatacctctggaaattgcatggtctacggtgatagccatcatcttattgctctttgggttcacaagtctgctcattcttactgcttttcctaacattgccataataattattctcctttttatgtaaactaaattttatacataccgctgtaattctgtctacggttctatgagtacctttaatccagaaccgcttttgcatacttcgtatgcatcctggaaatcatctattttgaaagtatgtgtcacaatttctttcaaattaactttcttgtttttcaccatatcagctgcttcaaaataatcttctctcttgtatgccgtactgccgtttacattaatttcattgtaatggatggtatttacctcaatggtagattccccggttccggcaaatccggcaaataagtttacggttccgcccttgcggcagagctttaaggtggaattgatgattgccgggacaccgatggccatcacgattacatccattcccagactgtccgtttctctcattactatgtcagccaggttttcttttgtggggtcaatcaccagatcagctcccagcttctccgccttttctcttctggaagctatcggttcacttacaattactttcttagctcctacaattttggacagctgcagatgcatcagtccgatgggacctgcccccacaattaatacggaatcgttaaatcctgttcctgcatttttcaagcctctgatacagcaggaaaggggttctatcaatgcgccctcttcaaaggaaacatcttcaggaagcttcaccacattaccgctctcaattgcaatgccaggaattagtacatattccgcaaagcctccgtcgaactcatatccgattgcttttctgttcatacaggcattttctcttccggtcagacagctgtgacaggaatgacaggggattacatttgcaatagataccttttctcctacttcaaagcctttcacattcttgccaacctcacaaatcagaccgcacatttcatgaccgatgatggaaggataacgcaccccttttgtcttagtacctgccagtatgcgcatatccgttccgcagatagctgcttttttcatctgcagaaggatatcattgtcaccaatctccggcctttccacttccgcagctttaaaatcattcgggccgtttaggacaactgctctcattttaaccactcctttatcttccttattctgttcttattttcctaggttcctatgaatgaatcatagcacttctgaaaacttttttcaatagtattttttatttttgtaatattttttcaaataccattcgattttttgtgtaatttcacagtttaggaataattatgggggttttttaggtttttatgtatatgcttgaaacttttttacaatatatttgaatttattttttcttatctattattatttttgtagttttttttcacatttcttacctttaagaatttccgggactccttcccagaagcctcgaaacacagctttcagatacgcaggaaataaaagtaagaacagcaggcagcagcactccaatggctgcagatacctgctgttcttacttctgtttcctgtatgtccggaatttgtaccatgcaatgaacgacctactgacctaaaatttattctgagaagtcgcctccctggtctcctgtatagctgcataagacttgtcatagtcagaaaatgcaataattgccactatcacatcaatcatagccagctgcgctatccttgtgctcacagattcagacttaaacatggtctcttctgcagcagtatacaaaaccacatctgcggtcttggataggggtgtcttcccctgactgactaaagcaatagtacctgcccccttgctttcggcatttttcatgcagttcaggacattataattactgcccgagtgggatatgcagaaggcaacatcccccttttctaacaaagaagaagccatcagctgcatatcaatgtcttcatagacataagtacggattcctattttcataaatttatgctgtgcgtccttgccaacaagcagacttccgccgctgccgaaaaagacaatcttatctgcctggcgaatcatatctgcaaccttttccagagttcctctctccaaaccggcaagtgtacggttcagtactgtaatctctgaactgaagatttttttgcagattgtttccacatcatcaaactgttcaatactgggattaaaatgtttttccctggggagcacatccttcgcagcatttatcttaaaatcctgatatcccttgtagccgatgcttttgcaaaagcgaacgacagaagcatcgctgacgcctgcgctttctgccagctcagtaatattataagttaaaactttatcgtaatggttcagaacatattctgctatttttttttcagtgttagtcaacagcttttcttttccccgaatcttttcaatacaactaatttctaccatagcccagcctccttaatcttacacgttttcacgctttataaggacagcatatcatacttgaaaatatttttcaatatctctctcatatttgtatgataaaataatatttttttcatcccattaaaattggctgtatataaattccggcgctgtagacaagtctgcatagaggaggtaagcgtaaagtatcagcatacacatcaaaaaaaacagaacctctgccgcaaaccttaacgttctgctatttttcagtttgttttgcaaagttataaatgctttcactcacatcaacccatcctttccatcccaaatgcatggtatcttcaagaaaatatttttcatattctctatccgaataatctgccagtactacctgatactcttttgcaatatccctgatgttctgatagtactcgttccttttctccttagaaaaccctgtataatcgtaccaccagccatttacaggaacatttaccaggagaggcgtaataccattctccctgcaaacatccaggaagcacctcagatcatcatattccggagatttgctgtagctgcttttggtgcctgaattttcccttttctttaccccctttttttggagtttgctgaaatatttgtccttaatattaaactcattaccctttgtctcctctgccccttctgcctccgcttcagccctcagcctctcaaaatcaatggccgaattcccggacggcttaccctttccgctggaaatcccgtctgctttcattccggccacagctgtctgcattgccttttcatccataaaaccggaatacagggcacagtaaaggtgctccggcaggctgcccttcttttttaagtatatcttattgtaggattttaccctctcctgggttttcggatcctcttccagaagtgtaatggtcctctgagcaatataatcttttgttttttgagaaagatttttgtttttcagcatagctacatagctggactccgaaaaccgggacgcatatgctttggaaggcactcccttttttcggaaccattggggggagagaatcagcactgccttttggttctgaatcgccggggcaatggctgacagggtaattgcgtgagacagactttgataatatccggctcctatcagcatggtatgaaactcctgaccagagaataccgcttccggatgaaagggagtgcccttgccgtgctccagctccgacgatccgaatactaccatagtgttctcatctacattctctcggatcgcctcccacgatttgaattttgcttcactggtccaggttcccactgccgagggttctgcctcaagctgtgacttcccgtacctatgcatccccaaaacagccgctccaaaaaacacaagggccgtaaaaaatgcgatcacccgcctcatatcagccccgctcggcaagcagcgccagaattttattggcggttgccatctcttctctttctacttctgagggggaaataacaatgccgaaggtatcttcaatatccaccagaagctctgtaaaccccagagaatccagcaaacctgcctcaaaaagatccagatccagatcctccctcacaacctcatcctcacaaattctttctaatatatctattaatttttcctgcattctgtgttcctccctttttattgcagtccctgtaccagctccaggaaacgccctgaaaatataaggaacccgagcattaccagctgaagagtaatgatccaggatactccctgataccagactgattttttatactttttataaaatttagattttttctgatatacctctgttgctgccaaaaggcagccgtggtataagccgtagcagagataggacaaggaaatcccatgccacattcccataatgagcatgtttacaatgaatcctgccgctgcgccctgcaggcgggtggaaaaccatttctttctgatggacttcatcataaagcgggagaagataaaatccctgaaccagtgggacaaggtgatatgccatcgatcccagaactccttcatatctctgctaataaatggtttattgaaattctccggcgttttgattccgaaaaaataactggttccgattgccataagactgtatcccgcaaagtcaaaaaacatgtagaatccatagaagtaagcataggccgcaacctcataccaaccacttccggacacaaaatagtctacgccctcatgaagcagggcggccaaaacaaatttatacaccatgcccaggagtattttttccaaccctctgcccgccatttccagatattctgtcctggaaagcgtacggttgtaatcttccccgaatcttcggcttctgtcgatgggaccgctgctgatagcgggaaagaacagaagaaaggaggtaaacgacaaaacatcaatctcctggattaccccgtcataagtctctataattatctgaagccccttaaaagtaagataagagattcccagaaaattgaacagatgaaagggcaggattcccgaaagcttgcataaaatcagcggcagcagagacaaaagtatgaaatggccataaattacagcattccgtccgtatattcttcgcagtctcagatatatctttacaatatgcagctgcagaacataaaacagagccaggaaagccagctgtctcaaatcccctctcagcaccagccagatgataaacagggaagacaccgccgtatagatccttaggcttttttcccggatgcccagcacaaaggccggaatcagcagaatcagcagccaaagaaagaagataaaatctgtataaaaactcattccagaagtcctttcagatacgcccgatctgcctttccgtttgtattgaccggaatcttatccaggaaaataatctttttgggtatcatgtaatcaggcagatattccttcagctgccgtttaatctcctgcgagatttgaaaaggctttgcccctgccggcacagcgtcaggttcccaagtcagaaaagcaaccaggctctttactttttcctcttcccatctgggcatcaccactgcctgacggatccctggcagaatccgcagattattttcaatatcccccagttcgatacggtatccgtgaagcttgacctgaaagtccatacgccctccaaagtacagcattccgtcttttttatatccctgatcctgtgtataatatccccggaccccgcccctttcctgaaaaaacgcctgttctgtcagggatgactgtccgtagtatccggtgcttacagtatctcctataatcacaatctctcccgtttcaccgtcaggaacctcagcgccctcctgattccggatctctatcctggttcccggctttgccctgcctaccggcaggggtacttcatgttcccccatccactcagtaatctcaacctctgttaccgctaccgtagactccgtggggccataggtgttcattacctttgcatgaggaaaccgttccttcagccttaaggctgtctggttggtcagaatctcgccgcagaacaggaacacttccagcctttccataagttcaccattaaatttgctgtctgccagacagatatccgcaaaagatggagtggaaacccaaacagccgcccgggactctttcagttcctgcagcagcacgccgtagtcgccctgtgttttcttgtccagcgcccgcagcgttcccccacagaagaggcaagtatacaggtccataacggaaaggtcaaaggaaaagggggcctggtttaaaaatacctttccggacttctcctcttctggtgtccccaaatcctttgaccagtccagaaaccggttcagacactcatatgtaatttccacgccttttggtgtgcctgtgctgccggaggtgaaaataatataaaaaatgtcttcggccttcacccagtgctccctgccgaccgctctggggtattctttccccagcgctcttattctgttcagggtcagagatgcttctgtgtcctgaggtgtggggcccaccgcaaaaataaccggaggctgtaccgcctgaataatatctctgactcttgcataaggcacggacagatccaccggacaataggcccgccctgcttttacacaggccaaaaaacataccagcatatatggatttttatgtccgtaaaccaccacaggtcctttctcctcaggaaaagaatctaaaagccatccccccagccggccggagtattcttctatctgcctgtaagtaagactctccccctccccaataaaagcagtctgactcccccgcagaccgctctgctgctttattttttctaatagttccacacagtcttcctcaccttcattcgtcatattctgactttttacaacagtatgagtatagtcctaagtttttaataattcggtggcacctttccaaagatattcttaattttatcttaattcgtccccattccccgtattttagcggtaattctttgattgatttttcattttttgtatgatattcttgcccataagaaggaggttttctatgagtacttattccgcctataccgatttttcacagttaaaaaatgactgcctgagcagttatagcgcttactgtcaaaagaatcagccagaaaacgccctgtctcagcttcttctggccgcctactatgagttcagcgggtgcattgataattacaccgcctattgctacggacttcagggcatttattcaaaaaaagacctgaaagcccttttcgtgcccccttgcccggacagcgaaatgatatcgggtctgcggtccctaaaaggccactacaagctggatatggcagacgatatatacaaaaaatatcctctccctctgtgcgtatgcactgtagaggaatacaagcagattctggaggaattattttctgaggaggtgtttcaggataaaaaatgggcgaatcgttttagagagaattacataaagagcattaaatgaatttaatggggcaaactacgcaaaaaatatcatgaacagggcggcctcttctgatacgatgtacccagaaactatccttagaatgcggtgagtgctgtataccttgccgcagggtatgataaaacagaaaaagaggtgtactcagatgacagatatcattgtgcagggacttacccaaaataatttaaaacatattacatttactataccaaaagaaaaaatcacagtttttaccggtgtgtccggctccggtaaatccagcattgtctttgataccatcgccgcagagtcccagcgtcagatgaatgccacctatccggcatttgtgcgttcaaggctgcctaagtaccccaagccgtcggtggaacgaatagataatctgacagcgtcagtggttgtagatcagtctcctctgggaggaaatgcccgctcaacggtagggaccgtcagcggtctgtactccagtctgcggctgttgttttctagattaggaaagccttatgcaggcacggcatcttacttttcttttaacgatcccaacggaatgtgcaaaacctgttccgggcttggcagaatttcagaagttaatatagcttccattttagatatgaacaaatcatggaatcagggctgcctaaaggattctttatatcgtccaggctcctggtactggagacagtatgcagactctggcctgtttgaccttgataagccaattaaagagtattccagagaagaatacaatcttcttatgtatggttctcagaacggcaaaggcgagcctgaaaatcctaaagtaaccggattaatccataagtatacaaaaactctcttaaatcgtgatattagtatcaaaagtaaacacactcaggaaaagtcccaaaccctgatttctgagatagaatgtaccagctgccggggacagcgtttaagtgaggctgcgctgcgctgcaaaatagagggatattccatcgcagacatgtgcgacatggaactgacacagctgagagaagtgctgtctcagctgtcagtcccaactgtagatgtactcatacagacactcatagaagggctggacagaatgatagagatcggactgccctatcttcatctgaaccgcgaaacaccgtctctgtccggcggggaagcacagagactgaagctggttcggtacatgggcagcagcctgacggggatgacctatatatttgatgaacccagctccgggatgcatccccgtgacgtctaccgtatgaacagccttttgaaacagctccgcgataaaggcaatacagttcttgtggtagaacatgataaagatgtgatctccattgccgattatgtgattgatgtgggaccgcaggccggacaaaacggaggggaaatcgtttttgcaggcagttatccggacttgctccggtcaaacacactgaccggaaaagccttgctccagattttgccggtcaggcagacaccccgccagccagtgggcagtcttccggtgcgggacgcctgtctgcataatttaaagcatgtagatgtggatatcccgctgggtataatgactgctgtgaccggcgtagccggttcaggaaaaagcaccctgatctcccgggtatttgccaaacagtatgaaaatgaagttgtgataattgaccagagcccaatcaaggcaacaaaccgttccactcccgcctcataccttggcttttttgatgaaatacggaaactgctggctagagaaaatagcaaagaagatggatggttcagtttcaattccataggcgcctgcccggtgtgcagaggaaaaggcgtcattgttactgaactcgcttttatggacccaataatcacagagtgtgagacctgcggcggagtacggtataacaaggaagccctgacctgtacctacaaaggaaaaaatatcgtccaactgctgaaccttactgcagcacaggcaatggatatattcgagaatactaagattaaaaaacatctggagcagatgcagatggtgggattaggctatctgactttaggacagccgctcagcaccctgtcagggggagaacgtcaaagaatcaagctggcaaagaatctcggaaaaaagggaagcattatcatcatggatgagccgaccacagggctgcacatgtccgatatccaaaacctgttaaagctgttcgacacacttgtgtccctgggaaacaccctggtagtaattgagcacaacctggatgtggtgaagcaagccgactggatcatagatataggtccggacggaggcaaaaatggcggcgaggtgatattcatgggaacaccaatggaaatggtaaagaacgcaaaaacccttacagcggatagtctgagagcatcatgctcccggtaatgtggggatgcaggcctttctcctgtccaatgcagtcagctgccgcgggattactctcaacgtccccgcgccatccacctgttctgatacaaaaacatcaacacgcccatcccgcagattaccaaataccccagccagctatatacatccggaacctgtccaaagataaaatatcccaggacagcagaaaataccacctgcgtataatcataaaccgatacttctctggccggtgcataatagtatgcagctgtgatggaaaactgccctcctgcggcacagagtccggccaggagaagaatggctgtctgcccaaagctcatgggatgaaactgccatacaagaaacggcagggtaacaagacaggagaatccggaaaagaaaaagacaataaacgctcccttttctttccgctctcccagtatccgaaccatagtgtaagcggcacccgcacctatccctcccaaaaggcctataaatgcgggaattatgtccattcccagaacggcaggttttacaatcagcatacttcccccaaaagcaattgctacagcaaagatttgaaaaggcctaaccttttctttcagaagaaaatagctgaagacaatggcaaaaaatggggacattttattcagcatggtggcatctgccagcatcaggtgatccaccgcataaaaattgcctaagattcctatggttccgaacaaagaacgcaggatcaggtattttatattgcctttctccccggaaaaccattctttttctctgaaaagaataaaggccgcaaaaaagaatgccaccagatttctgaaaaagcttttttgtaccgagggcagatctccggaaagccgcacacaaagactcataagtgcgaaccagaacgccgccgacagaatacagagtattcccttatattttttctttatgatcatccaatctctctcctcctcacagaaatgctatactcacagcaatatagacagtttctctacatagtaaaacggcggaaaccctccgccgtttacgatctactgtctgtaatgctctaaaaagtcccctaatttttccactgcatcttccagctggggctgggccggcagatatacgatcctgaaatgatccggttcttcccagttaaaaccacccccatggaccagcaatacccgcttttccttcagaaagtccaggcaaaactgctcatcgtccgttatattaaatttcttgacgtccaccttgggaaagatatagaatgctgcctttggctttttcgccgttattccgggaatatcattcaacgcctcgtatatgtattccctctgctcataaatccttccccctggctgaatatattcattcacactctggtatccgcccagagctgtctgtacaatagcctgcgccgggacattggagcaaagccgcatattagacagcatattcaagccttcaatatatccctgcacatgtgcttttctgccgcttaacaccatccaaccaattctgaagcctgcaaccatatgagatttagacagaccatttagggtaacacagaacaaatccggagccagcgaggcaatggatatatgctcctgcccgtcaaatacaagacgatcgtagatttcgtcggagaaaataattaattcatgttctctggcaatggctacaatctcttccagaacctctctggggtaaagagctcccgtaggattgttgggattgataatgactatagcttttgtcctatctgtaaccttttttctgatatcgtccatatccggataccagtccgcatcttcgtcgcatacatagtgcacagccttcccccccgacagattcacgcaccctgtccacaggggatagtccggggagggaaccagaatctcgtccccatcgtccaccaatccctgcatagccatatttatcagttcgctgacaccattgcccgtataaatatcgttcatttccacacccggaatgttcttcagctgacaatactgcataattgcctttctggctgaaaaaatcccccgggagtcggaatatccctgagaatctctgagggtggcaatcatatctgcaatcacttcttccggtgcggaaaacccaaacggtgccggatttccaatattcagcttcaggatatcaatgccattctcactcatacggctcgcttcttccaccaccggtccccgcacgtcgtagcatacattctccagtttccctgatttttcaaatgttctcatacttcaccctccttttttcatattatattacggtattagaagcagtttaccattattcaaaaaaaaacgcaacaaaatcttcggatttcactgcgcttttccgtatttttttgtttaccattttgtttaccattccatagaagattccaaaagctgttttgtataaggatgtttcggatggctgtatacctcctcaatctctccctcttctacgatttgaccatctttcattacaattaccctgtcacacatctgataaattacattcaggtcgtgggagataaaaagatacgaaagccccatttcctcttgaagcgaaatcattagttccatgagttgcttctgtatggttacatccagagcagacactggttcatcggcaatgataaaccgggatccctgtatcagggagatggcaatgctcaccctctggcgctgccctccgctgagctccctgggatagcgttccagatagtctctggtaagcccaaccctttctatcatattctctacctgttgacgccgctctgcttttcctgcccttgaattgtggcggagaggttcctccagaatccatcctatttttttgcctggattcagtgagctgaaggggtcttgaaaaaccatctgaggattctttgtatgatgaataatctctccctcataatctttcacaaaacccaggattgccttggagagggttgatttaccgcacccgctctcccccacaagtccgagaatctctccttgatgaactacaaaggaaacatccttcagcacctgctgacgtttctgccccggatccttatagaaagagttcatatgtctgacttctaacacaacggtatcactcatgcagcttcctcctccgcagtctggtctctctcgtgggaatggacgacaaaagtttcctggtgtaatcttctttcggactctcaaaaagggactcgatattcccctgttccacagtcaccccctggtgcattaccagagcccggtcacataattttctgaccacaccaagatcgtgggagataaaaagaatagctgtcttcttctccctattaatcttttgcaaaagcttcagaatctcagcctgaatggtaacatccagcgcagtggtcggttcatctgctatcatcaccctgggattcagaaccagagcagatgcaatcatgactctctggcgcattcccccggacagctgatgagggtatttatgataaagctcccctggatttgggagctctgcagccttcatcatctccagggccttcttctttctctcttccttccccatatccgtgtgaatcttcaggctctcttctacctgcatgcccaccgggagaacggggttcagagaagtcattggctcctgaaaaatcatactgatctcatttccccgcaggcttctcagttcctcctcggatgcgcgcaagagatctttgcccatccagagaatctctccggattctattctggctgtttttttcagaagccccataagtgccagggccatcatagtctttccggagcccgattcccccacaatcccaaggatctccccgggttccatggtcatagaaaagtccgacagtaccacgtcgggaaccggtgaatcataaaagctgatggtcagatgctttatctccagcatgatacgcttccccttcctttctgcaaaccgtcactcaaaagtccgaatccaagcaccaaaaggataactgtaagcccgggaaacacagcgcaccagggagctcttgagagatacgtctgcgactccgccagcattcttccaaggctggcatccgggggctgcacaccgatccccagatagctcatgcctgcttccgcaagcacggcattgttaaacccgatggcaatcgctgacagcagggtgggaaccacgtttggaagtatatgcacgaacataatccgcacatgagaggcacccataagcctggcactttttacatagtccttctctttattggagataaactcgcttctcactattctggcgaagcttgggataaatataacgcccagagccagaatcacattatatttgccagggcctaaaatacttatgaaaaccaatgcaagcaatatactgggaaacgatgccacagcatcattaattctcataaggatttcatccagccagcctccgaagtaacctgtaaaggctcctgccagcgtaccgatccccccgccgatcactatagtagataccgctacaaaaaaggtggttccgctgcctgttaagactctgctgaaaatgtcccggccgaaatggtcacagccaaacagatgctgcagagatggacctgcaaactttgaaggtccgctcatggcatccgggtcatagggcgtgtaaaaaaggccgaccaccataaaggctatcatcagagccgccaaacagccccccagaataagattataatttctctcttttctcttcattgccttttcctttccgtctattgcccggtaattctgggatcgatccttctatacaacagatcgacaataaagtttacaatgactacaaggcctgcaatcagcacaataatacactggaccaccggataatctctgtttgatatagaagtaatcagcatagttcccaaacctgggatggtaaaaacctgttcgataataatgctgccggccacgatatcggcaatggtcatagcccaaaaagtaagtaccggaatcaacgcgtttctcagcacatggcggtacaaaaccgtgttttcccggcaccctctgctgatggcagtccgtacataatcagactgcagctcctgaatcactgatccccggagcatcttcacacccatagcgcattttggaagtgctatggcaatgcacggagggataaggtagatgagaaacccggaaaagctctctgtatatgagatatatcctcccggcacaaaccacttcagcacaagtccgaacagataggtgatgagaatacccaggaagaatcccgggacagacattacaatctggttgacaaccgtcaatgcccggtccagacttttaccctcatgttttcctgccaacagtcccaacggcaccgacaaaatcaaaatcatcagaaaagaaatcatagtaatggccagcgtaatcggcagcttgcttcctatcatctctctcaccggcatactgtagctgtaggaggtacccatatctccccgtacaaaatctgccagccatctgccgtaacgcaccagcacaggctgattcagccccatctcctgccgcagcgcctctgccttttcagcagtagctgccgtacccagcttagacagcgccgcatcccccggaataatctggaacgcgaggaaggataaaaaagagacaattaacaatgttataatgagagttcctgttttctttgcaatatattttatattcacaccatcttcctcctttccggtaccccggaggaccgcctgtcccctgctattcttctattttatagatctttgccatatcctgcacatataaaggatagaatacatatccgtcatattccggattcaaagccacctcacaggccatatcctcaatatatacattcgccgcatcctctgccagaattgtctccatctctttgtacagctctacctgccgggcatcgtctgtggtctttttaatctcctgataaagactatcgtatttttcatttttaaaattaataaagtttaccggggagtcagaagtaaatctctccagaagggcgccacctgttaaagcagaggcatccactcccactactgtagactgatagtctctgttcgcatagacatcgctgagccagctgtcccattcaatgagctgtatctccgcgttaattccaatctgcttaagctgctccttcagaacctgagccgtatctacatgctgctggtaattcgaaggcaccgtaatcgtcatatcaaatccatccggatatccggcctccgccagaagttcttttgccttagtcacatcctggggatacatatccgccagctccggcacataatacttcccgaatgccggaaacatactgctgccaatagccgtacctttgccgtctgcaatcatatccatgacttcctgccggttcaccgcataacacatagcctgtcttactttaatgttgttaaaaggctccactgcgttattcaggtataaagcctgaatcagattcatactgccctcataaatggtaaaatcgtcctttaactcagccgactgggtggaatcgattctggcaaacatatcaatcgatccgcctttcaggccggttactatggcattgctgtcagatagcaccttaaatgtaacctcgtccagatatgcgggagttccccaatagtctgcaaacttttttacaataatattctcctggggagaccttgagacatattgaaaggggccggtaccaataggatcggtatccggattctcattgtctttgggaataatggcagtggtaaggtaggccaggaattccgtatctgcttctgtcagatggataaccactgttttcccgtcgggcgtctccacaccggcgatattagaaaacgctgataccaacggttccccgttagaggtatcagcgcatcgttcgatggaatattttacatcgtctacggtaacgtccgctccattgtggaatttgattccttcccttaaggtgaaggtatacgtctttccatcatcagatatagcgtggctttctgctaccgcatcgataaagtttcctgtttcatctggctttactaagccttcaaaaatgttaaataggatttcttttgttcctgccgctactgccttgtgagggtcaagactatcctctatatcctgaggaattcctactacaatggaacctcccatggttggttccgttttggttgtctgagaacttttgtctgtagaagagtctttaccgctgtcctttttgtcctggcatccgccaagtacaatagtaagggtaagtaagccaagcagtacaaacatcttagatttctgtactcttttcattgtatctccttttcctttaagttctctcattcattatataattgtcttcttcattgtatccaatccttgttctatatgcaagtatcttttttcgaacatagtaattttttactgctccccaagcatttttttcaattcatccataaaggtattgacatccttgaattccctgtacacggaagcaaagcgcacataggcaacaggatccagctctttcagacgatccataacaatctctccaacctctgtgctggggatttcccgctcctcccgattgaagatttcagtctctatatcatcaatggcatctgtaatcgactgcaccggtatggggcgcttataacaggctctcatgattccatcctctatcttggagcggttgtactgttctctgctctgatccttttttatcactatcaaaggaatcgtctctaccttttcatacgtagtaaaccgtttcccgcattcatcacacattctccttctgcgaatagaattggtctcctccacgggcctggaatccacgaccctggtgttctcctgattgcaaaatggacatctcatggacagtacctcctgtttttccctgtacgttatacatataatggactatatcttgtgtccaacccttctgtttatactaagtaaagtataatacatccccttttgttcgtcaatgaaaggagggtataaatggagatacttcccatataatagtataaaatcccctgtttatgaggcctgcctatgcgcgtgtgtgaattaaagcagaaagaagtcataaatgtctgcacctgcaaaagtctgggatgccctgtggatttggaatttgacccggattcgggctgcatcaccgcaatcataatacccgtgcccggtaaaatctgtaatttgttcggaccggtgagcgaattcgtaattccatggaaatgtattacccagattggagaagacattatcttagtggaaatacaggaagagaagtttttacataagggatagccgataaatggtttctccttcttttattgtctccagtacttttatatctttcaaattttccagcgggactttcagaggatcctgatccaggatcaccagatccgccttcttacccggagacagcgtccccttttctgtctcctcaaaatactgatacgcaccatacaccgtcactgccttcagagcagttaggacatcaagccgctcttcctttcccagcacacagccgtcctttgttctcctgttaactgcacaccacagggtctccatcatatccggggaaatgacaggcgaatcctgatgaaatgtaaatggaatccccatccgggaagcagaacctgcaggactgatgtatgccgcccgcctgcttcccagattcttaatgtgtgtatctccccagtgatagatgtgggcaatgaaaaaggagggaatcacctgcaatcttttcacctcttccatctgatctcttgccagcatctgggcatggatcatcaccggccgcaaggcggaaaacatttcccccggccggctttccacagccctcaccgctttcagatactgagcacaggcggcgtcaccattgcagtgagccagaagctgcatatggttcttttccgccatccctgcagtttcttctacatcagcctgcttcacagctggatatccacggtactctttttccccttcatacggttctctcagccaggcagtccttccctggggggatccgtctaaaaatattttatacccgcagagcttaaagtggcccttgtaggtgtgcagatagcccgcaagcttccgggctatctcctcccccttgcctgcatcggcatatcccaccagatccagcttcagacagccagacttcagaagttcttggtacagagggagcatctcctctgttagcatcccctcctgtactgtggttatgccatgggaagcatacacttcctgggcacgtatataggcgtctaaaagctcctttgcagaggggagaggtatcttttttagatactccaggaacgcattctcctccatataaccggtgagcttcccatccttcttctctattacgccgccttcagggactactgtatccgccccaatctccaactgtttcatggctgcggtgttgaaaatccctacatggccggactggtgctgcactaccataggatgttccggtgctacacgatcaagaagctccagactgggatgcctcttctcctccagccggttatggtcataacctctcacaagaatccagctgccctctgccggttttcttgcctcaagctcttgtttcagcgttttctctatctccttaaaattgccgcacgcctccagggatatctgcagcaatccgttggcgacacctgtgaaatggctgtgggcatcaataaatcccggcaggagagtgtgtcccttcaagtcaattttctccggggcttccgcttttgcctctgcctccttcaggctgcccgcaaaaaggattttcccgtcctttatcaggaccgcctccgcataaagtccatcctcttccattgttatgacagaaccgtgataaaacaatttttccatcgatatcttccctttctcggtataaccttacacctttttggttagtatctccggatttttccctggcattccctcagcgcttattcctgtttagatatcctgcaatctttctggcatcctctatctccaaatccttttcccctgccagagattccagatgatgagtcagttcatgacgcagagtctccctcagttttttcttccaaaggctctcggaagactcagggtatagcgctgcaaaagaaccgtaatagattgtgataattcttcccagatgtgaactcttatgatattggcccataatatacagatcgtgattctgtgctgccggactcagcctgacagcagggcttaagtttacaccaccgtttaattctatgtaatactccccgggaatctcctgtaccagctcttccagcaattcctgggtcctttccatggataccatgtctaacctccgtccctttggttctcaacaatcgttattatggtattatactgtatcccaaagataactgtcaaagtattctgcgccggctcctctctaaagggctggggaatgcgcatctgccgcaaacccagcctaaaattgatctgtatagtaaagtcccctgaaaacaaatctaccggagataatttttcatgttcttcagcgcatttttttccagcctgctcacctgcgcctgggagataccgatctcttccgctacctccatctgtgtcttcccctcatagaagcgcagctgtacaatatatctctccctctctcccagtctcttcatcgcctctctgagagacaagtcctctatccagttctcttccttgttctttttatcactgatctgatccatcacatacaaggtatctcccccttctgtatagacaggttcgtacagactcacgggactctgtatggcatccagagcgtatacgatatcctctttttcgatcccaatctcactggcaatctcattgatggttggttctttcagattctttttcacataattctctctggcataaatagctttatatgcaatatccctgagggatcggcttacccgtatgctgttgttgtccctcaggtaacgacggatctcacctattatcataggcaccgcataagtagagaacttcacgtttaaggtagtatcaaaattatcgattgcctttatcagtcctatgcagccaatctgaaacaaatcatctacattttcattgcttcccgaaaaccttttgattacacttaacactaacctgaggtttcccttaatgtacagttctctggcttctgtatcacccgcctttattctctcaaacaaagcatccttttcttcatttgtcagagtaggaagctttgccgtattcacgccgcatatttcaactttgttcagtgccatagtaagaatcctcctaatcagttttactaattaaaatgattctcacaaagagatggaaatatacgatttccaaaaaaatataaaaaataaaagcccttgacatttcttgtcaagggcaaacctctattcatatctgacgatctcttttttcagccttttcataattcttttttccagtctggatatgtaagactgggaaatacccagaagatccgctacctctttctgcgttttttcccttccgtcaggcatatttattccaaagcgaagcttgataatggtctgctcccttgcagacaattttccgatggctttgcctaacagctttcgctccacttcattttctatatcccggtatatcacatcttcatcagtgcccagaatgtcagagagaagcagctcattcccatcccagtccacattcagaggttcatcgatagagacctccatcttcgttttgttatttcttctcagatacatcagaatttcattttcaatacacctggatgcataagtagccagcttaatcttcttggtagggttaaaggtattaattgctttgatcagcccaatggtgccgatagagatcaaatcctccaccccgacccctgtattatcaaatttttttgctatatacactaccagtctgagattgtgctctatcagtctggatcttgcctcttcccctcccgaagactgaagcgccgctatcatttccgcctctgactgggcatccagaggcgccggcagcacctcagcacctccgatatagtgaatttcttttcctcttgaaaatataatgttcgaaaatcccagcataggaaaccgaacttgtttttgcacagctgtgtccatatacataagaaacctcctcaattgtctatgatttttggattaataatcatttgaaatttattgccctgtgacagtttatcacctgtcaaggccaccaccggccgttgaatcagcttactgtcgctatccaaagaaacacacaggatatccagagtcactgccaggagcaagccctgttctttcccaacagaatggtacaggacataatggggatgcatcttttctaccgcatctccactctccccaaactgcatcatattctgcagctgcatatcctgttcctcactcagaagttttttcaccgcctggtactctactacagatacaggtttatgagtcgccgtatcctgcagatgatttcctgtgtcgtaaagtccttttaccctctcacatttcccattgacataaagagatatgtcgtagatttccgataccttagctttcaggtatccgtagagtcttattcctatgataattgcccagtagcttactatactaagaaataaaaacgtccgaattcctactgcaccaggactttctcccaacagtatttctcttgcccagtttcccagtctggtagtctccagaagcgcctgtatcaggccccccgccagaaaggcagcaagatataatgtaagtactccccgaaccatacgttttatccctttgcagccacatcccacccgaaccatcaagataccgataaacccatgcataaacagcaaaattatccatatacttctaaagggcagtaagaccgccaggcacatacccgccgcaccgatcgcgcttcccgcaaggcttctgaggcatgtggcagagcctcccaaaagcctgtttaccagacgcagcaaaaagtagtccattaccatattcaccacaaacagaacgtctatgtatatttcatagtacacaaaacaccccctataacctatgaatgcgtacttattggaataagcactgttcattataggtgatagagggtgttaattttgtcaaaaccacagcctgaacttaaaaatcttatcgacagtattgatggatattcgccagcagtccgcgcagttcttccacaggtatctgcccgggtgcagacgcctgtcccatactgccgaaggtgatagcggaaccgaagacagcgccgcagatacggctcaaagctcccttttggcccatagacatggtaaccaccggcttttttgtcttcccttttacttcattagttgcacacaaaattttcagcaaatccccttcatcttttggcatggcggccaattttacaatatccgccccaaccgcatccatctgcataagccgccggatgatctcatccttttcaggggtttcctggaaattatgggaggatcctaccacttttactcccaaaccatggagctcccttatcagtcttttcgacatttccggatctttgcagcattcaacatccacaagatccacttttttggtctccgccgccataagatttaattttctgtagctgtccggttccatggttctctctcctccttcctccctgcttcggaacgtaaagagaaggggaatccctttcaggcgcatctccaccccatttagaacttctctcacgcgctccggacaatctatctcctgaaaaaaatcacagcgccactctgcaaggtcaggggaggtctctgctatcttatccgcttcatcaaaaatctttttccaggtgtcccctactatagggacgcatattttagggatcccttccccgattctaagttttttcacacatactatatccgtcatttccacatacgacctcctgaatcaattctgatgccattatagcacgcatccagacaggcgtccaacatttgaatcacttgacagccgcccaatcctaaactaagatattcacataatacaaacggaggatcatttacatatgaatacaacaccggattatatacccattacaggccatacccgtctgaccgcccttttgggaagccctgtaacccacagtatctcacccttaatgcacaatgaaagcttccgccttctgggattagactacgtatacctatgttttgacgtcaaagaagacacccttgaggaagctgtccgcggactccgccagaccggcatccggggttttaacctcacaatgcctaacaaaaataaaattgttcaactggctgacaggctctctctgtccgtgcagctcataggagccgccaacaccattgtaaacgataatgggattctcactgcatacaatacggacggctatggctttatgcagtccgtaaaggatgccggccatgaaatcacaggcaaaaccatgacgctcatgggaatcggcggcgccgccgccgcaatctgtgcccaggcggctctggacggagtaaaaaaaatacacatattcgcacgccctaccagccgcttctggaaccgcacagaggaaatgattaagaaaatccatcaaaaaactgcctgtaccgtcattcttcatgaaaacggggatctccctgcactaaaaaaagcgctggaagaaagcgctcttctggtaaatgctacctccgtaggcatggctccgcataccggaaattccattattgaagacgcctcacttctgacgccccatctggcagtgggcgatatcatttataaccccagggaaaccaaactgctatccatggcaagagagcgggggtgcccaacctttaacggcatgtatatgctgctgtaccagggtgcggaggcctttaaattgtggactggcagagaaatgccggtggatgtgataaaagagaaatatttttccgagtgatagttttgtgtatgtaaagctcgaataaaatcgttggcaagtgtcacggacggacggtaaagggaggcggtcatggggccatgaccgcctccctttacctggcagatactcacatcacattcacggaaaacgggtggggaaggtcgggagttgtacacttttcatcctgcttagcactattattagctcgatgtttgggataaatctacctcctggaacttttccataaccaggtgagagaaatcctacgttatcatcccactaaagcaaaaaaagactgccgcatatcacacggcagtctttcccaattatttatttctgttcttcaggaaatccggaatctgaatgtccttcttaggtacattacttgtagtaggtgcctgattcggctgcagcggtgatgtaaaggtcggctgcgtgaatgtaggctgtgtaaataccggctgctgtactggctgttgaaccggctgctggttaaatgcaggctgattaaaggtcggctgtttgaacgccggcgctttctgctgctgttgctgtgcattcttctgttctgcgcttctctttgcatttctggatacactggccgttcttgtggtagcgtcatccaatccggtagcaataaccgtaatccttgcgtaatctgcttctttatcatcgtacatagcaccgaagataatgttcgcatcctcccctgccagttcctgcacatagcttgcggcatcattggcatccataagagagatatctccggagatattgataatcacgtgggaagcaccttcgatggtggtctccagaagcggactggcaactgcctgctgcactgcctccagagctttctcatcgccttttgactcaccgataccaatgtgagccacacccttgtctgtcataaccgtctgcacgtcggcaaagtcaaggttaatcagagcgggaagattaatcaggtccgtaatgccctgcactgcctgctgcagcacttcatccgcttttctcagtgcctccggcattgtagtgcggcgatctacgatctccagcaatttatcattggggattacaattaaagtatccacatggtcttttaacttctcaattcctgacagggcattgctcatacgtgtcttagcttcaaaacggaaaggttttgttacaacacctaccgtaaggatccccatctctttcgccaatccggctacgattggtgccgcaccggttcctgtgccgcctcccataccgcaagttacaaataccatgtccgcaccctgcataacctgtctcagctcttcgacgctttcttccgctgccttttcgccgatttccggcttcgcgcctgctcccagaccctttgtcagcttttcaccgatctgaagaacggttggtgccttacataaagtaagggcttgtttatctgtattgactcctacgaattctactccgccgatggtttcttccaccattctgttgactgcattatttccagcgccacctacaccaattactatgatttttgcagatgattccgcctcgttcgtcataatttctaacaaagtgcttcctcctttaaactaccctcgtataattttaacccttcaaaaatggattgtcgtattagttactgtgatgcttgcatatagatatataatatatttttttcttcaatttatcaaccacaaatttcgatttttccttttttttataaattattcttttttatgacatatttcgttcttaatctgtggattctgcctctatggttttgtctttttccccggaatcctggctgtcctcgtcagaatccgatgcctcatctttttcaaaggtaacgttttttgcatcattggttatattttccaggtgcaacagcccctttttctcttccagatacggaagaattgccgcaaggtgggtaaccttttcttccagatagctgtcttctcccatagtcacctgtatatccccataatataaggtaatattatatttcttatccagtacaatcctgtctggttctatctcgtttttcgcaatcatacggctcaggctcaggattgtattaaaaatatcttcgttgtctatgggaagcttgtcctttagagccacatgatcgaattccagcccttcaatgtaggggaccccctccaaaggttccacggtactttctgcaataattccctttttatcaaagtacatgtacccgtccagaaagggcacatagccaatgagctccttttccactacatggatggctattttattgggtgacagccgttccactgtaatggcttgaataaagggagtatcttttgtattttcctctatatctgtcattggaaataatatagagttggatttaaaaggtcccttcatgaccatcttttggatttccttctctgtataatggtgattgccgtccacttctatctccgtaatccgaaagcagacaaaaaaagcaatcacgcttaacagtataattcccagaataccggccacaatgatgcgaaatatctttttatcaatcttttttctgtattgtgattccttcataccaatcccctttagtctctccggatattgcctcccaaagatgccaggtcatcgcatatatgctcatatccccgctcaatgaaatgtctgttgttaatataagtagttccacaggcccctaatccggcaattaccagggcagcaccccctctgagctcctgggcaaacacttgcgcgccctgaagacggggtactccttcaataatggcatctctgccgtcaattacaattctggcccccatctttgtcagctgggaagccactttgaatctgtcctcgaatacagtctctctgatatggctctttccgggcaccgatgccagaacagccatcagcggtgactgcatatccgtggggaatcctggataaacctgggtttccaaataagaaacaggcgtatccacctttctgccgcacagaaacagtttaccaccttttgcttcatattgtccacccattttctcgtaagcctccagcaaggcattcatttcttctatcgggggattttccagaataatatctcccctggttgcagcacaggcacatacataggtgcctgccacaatccgatcagccgggatgtcaaactccactgcgtgcagggaactgacgccccggatccgcagcgtgtccgtaccggtaccctctattcttgcccccatttgatttagaaaacggcacagccatactacttccggttctgccgcacatccagagagcctggtatctcctttcgctttcacggcagccaaaagcgcattctgtgtggctcctacacttgcctttttgaagaagatatccgctccctttaattctttcgcagttacatgcagtattccgtctatttcctctatagcggctcccagcctggctagtgccagaagatgcaggtttataggcctggaacctatcacacagcctcccggatagggaatattagcttttcccatccttcccagaaggctccccatgacaaccacagaggagcgcattttttccccatattccctgggtatttctgttcctgtgacagaggtgctgtcgatatacagcgtatcgccctcccaccacacaagtgcacccagagatcggagtatttcttccatatattttacatctgctattctggggcagcccttcagtgcgcagataccttcctgcaacagagtggctgccatcataggcaacgctgcatttttggaaccctgtatagcaatggaaccctgaagtggttttcctcccacgattctgatactgtccaaccaatacactcctatttgctcttatatactatagtatgcagggttcctcaaagggttacttctgataacggctgaccgacagcgccagccccatctcacttaggagaaacagcaccgaggtacctccataacttatgaaagggagagtaatgcctgtgttgggtattgtattggtaactactgctatattcagaattacctggatcgccatatgccccataataccaatggctatcaatgcccccagcagatctgtggcatgagtggcaatcaccatcagacgccagattaaaagcccaaacacgagaatcagaatacaggcgcctaccagccccgtctcctcgcagataatggagaaaatcatgtcattctgggcctccggcacgaaccccagcttctggagactgctccccagacctttcccaaagatacctccgcttcctatggcgtatagtccctggatggtctgaaagcctttgtcgtatttttcaggatctctccagatagccagccgctccaggcggtagctctccatgctgagaaaaattcccacaaatgcaatccccagccctccgatccatataaaaggcagatacttgggattggacacaaaaattaaaattacggctattcccagtataataatagccgtacttaaattgtttgtgcctaccagccctacaataggaaggatcaggagcatgatctttcccatggaaagcaggccgttctttttactttttgaattactgataacatatgcaagaagcaggatcactgctacttttgcaaattccgctggctggaaggacagaggacctatagacagccaccgcttcgaaccattgtactcatccccaaagaataataccgccagagaaagcagcagagaagccagatatccccagggggcgtattttgccagccaatgatagtccacgcaggaacttatgtacatccccaaaagccccagagcggtcgcaaaaagctgtttcttaaaataataggcggggtcatcgaatttcacccgcccattatatgcacttgtgctatataaaataattaatccaaacactaccagaaacaaaaccaaaatcagcagaagctcatctgcctggcgcttgggttctgtgtctttctgcaagcaatcacttcctgtctgccgcggaccgggaaagccccgccgcagttccatatccttacttacagtgtatgtacgtattccttaaacatattccctctttgttcataattgtcaaactgcccccagctggcgcaggcaggtgagaggagaaccgcatccccgggattagccttttgtgcacagatttttactgcctcctccaggtctttggccaggatagtgtctgtaaaaccacatgcatgggcagccctctcaatcttttcccttgtctgtccgatgagtaccagatagcgcacctttccctcaaaggaccggatccagtcttcgtaggaagagttcttgtcgtaacccccaccaatcagaagagtcggccggttcatcgcctgaacccctttaatggcagcatccgggttggtccctttggagtcgttatagtaccggacaccatttttttcggtcacaaactcaattctatgctccactgccgtaaaagcgcagatacttttccgaatgctctctacaggaacacctgcatgataagctatagccacagcagccattacattttcatagttatgctgtccaagaagctgaagttcctgagttttaacaacagatatctcctccttgtccgtcttcagcacaatcctgtccccatccaggtaaatccctctgtcaagtttgcgcacactggaaaaaaagcagggagagggcttcatacatcccgcaaattcccggagaacctcatcctcataattcagtacgcacacatcctccggtctctggtttgctgtgatcagctccttcacacgtatgtattcctccattgtgtgatgacggttcagatgatcctcggtaatattcagaatcgcacttacttttggtgcaaaggtttctgtagtctccagctgaaagctgcttatctcggctacaacaaagctttcctccttggtttccaaagccactgatgtgtaaggcgttcctatattccccacaacaaatacactggatgcatagtccctcattatggcccctgttaacgccgttgttgtagtctttccattcgtccctgtaatagccagtaccgagcctctgcctacctggtacgccagttctacctctccccatacgggaattcccctgtcttgtgcccgctctgccacaggaatatccaatgggacgccagggctcatgataaccgcgtcaaaggtttgcagtaattcctccggcatgtctccaatctgcacctgtgctttgctgccctttggaagttttgcttctatctgtgctttatccagtttctcattcccgtcatacagcacaacaccggcacccacatcctccagcagacgggccgcccccatgccgctgattcccgtaccaaataccattacctttttgccattccaattcatactccttatttcctttcttcttatccttttccctgtcaggaaattgtcattccataccgttcttatctaaagtgcaagaaacccaatcaggcagaggagggcagttacaattgagaatacagccaccaccctagtctccgaccatccgcacaattcaaaatgatggtgaatgggtgccatcttaaaaatacgttttccgcccgttgccttataataggatacctgaagcatcaccgacagtacctccactagataaatcagtcccacaatagggataaacagcggcatctgaagcatataggcggttccggccacaaatcctcccagggcaagggaacccgtatcccccataaaaaccctggctgggaatacattaaaaagcaaaaatcccatcaagcttcccaccaccgcgcaggtaatgggctcaattccgcttttatctccgatggctaccaccgagaaaaaggtagccaccataatggttacgctggatgccaatccgtccagaccgtcggtaaagttcactccgtttacggtaccgattaccgcaaggaacaaaagaggaatcgccagccattcaatattccagtaatgccctctccagaaagggattctcatagtcagagaaacatccgtaaagttgagcacataaaacgtaaaaacagcggttactaccagctgaagagcaaacttttgggacggcatcagtccgtcagaccgccgcagcaccactttcagataatcatccaaaaacccaatgattccaaatcccagcgtcaaaaataggataggaataatctttgggtagtcctttacatacagcagtgaggtcaccactgttgaaagcaggaagataagtcctcccatcgtgggggtacccgctttttttaaatgggactgtacgccgtcgatccgttccgtttgccccatcttcagttttctgagataaggaatgataatcggtcccagcaatgcactgatcgcaaaggcaatcagcacaggaaataccattttagcatccatcctaatacacctcattcacattcttttgttttattctcgtctagtatatagcttttcttcttatttatcaaccttcaaccccaagatacgggagaatattctcgaagatttctttcattacaggcgccgctattgtccctccataatatactccctggggatcatggataacgattaagcccagcacctggggattatctgttggagtaaatcccaaaaatgatgagatataacggtttgcgcttctgggaagcgtctgggaggtggcagtcttccctccgatggttctgccctcgatgtaagcattcttcccggaacctccggatactacattttccagaatatactgcatggtctcagaggtttcctgggatacgatatgtttctttttttcataggcaagtgtctcgatcagcttgccgtcatcgtcccttacctcaactccaaaatgaggtgtcaccctggtccccccattgatgatggagcttactgtggttgccagctgtatgggggttatctggaaagactgtccgaaggatatggtggcaagctctacctgccctacattcttcttctggtgcataatagtggcagcctcaccggggagatcgataccggtcttctccatcagcccaaactgtttaaaatacttataataattatccacacccagacggagtcccacttcaataaatacagggttgcaggaattcatagccccctgaagaaatgtctcaccgccgtggccggtccgtttatggcagtggatccgccgatcctccaccaccttatatcctgggcaggaaaaggtgtcattgagggttactactccttcttccaggcctgctgccgcagtaattatcttaaacgtagagcccggttcataggtatcgtttatgcacaggttccgccacataccattccaggcatcctgtttttctttatccgtcatccctgaggtgtcttccgacgtattcaatttgaagggctcgttcaaatcaaattccggtgtattgaccattgccagtatctcaccgttctggggattcataagcaggattgatacagcgtccgcctgcttctgctccataacctttttcgctgcctgctccgcgtacatctgaacatttctgtccaggctgatatggagattgtatcccgacacagggtccacccggctctccccgatttcatccagttctacccctctggcatctgtcgtcgtcagaatctttccgtctattcccttaagaacgtcctcatacataacctccaggcctataatcccctgattatctccccctgtaaagcccagtacctttgaagccagagtgtcatagggataatagcgtttaaaatcctcatcaaccttcacaccatccaacccataatttcgaattctgtctcccacttccttttccacattcgtttttacccgttcaatagaggaaaccttttcaactctttttcgtgctgtctcttcatccagtcccagttctttttgaagcatggcaattacagcatccttgtctgtaatttggctatggatgacagatattgtacaaaccgtcttgtttgcagcaagtactgtgccattggcatctatgatcttgcctctggccgctttaatatccctctccctctcatgcagctcttctgcctttttcgcataataatctgactgaaataccatcaaatacaccatcctgcccaccagacccaaaagcatacagatacaggcagcaaacacaatcactgttttcttcttatgataggttctattcttcttcaactcgccctaccgtccaaaccttatccctacaatctatggagaaaaagttccagttattccgttggggacacccctaaatgaatttgggacgtgttccttttaaaaagaacacgtcccctttttattattcggataatccggcctcttcattggtaatcccatctgattcctgattattcggttctacctcatcctcactctcctggttctccgggggatccggtacattttcatcctcgattccgtctccggagatatcgctctcctgtgcgtctccatcatcatcctcctgatcctcagctcccacatcattttgctttttcactcctgtaaagccctcccagagcacggtagcctggctggtatcttcatcggggaagatatccatatacggcagaatttccgaaagcactgcctgagcaatgtactgtgggtacttgctgttgtcctgacgctctgcatttggctcgtcaactactacgtagataactacctggggatcatccagcggagcaaatccgataaaggataccaggtactttccgctgcccctgggaatcttctgtgctgttcctgtcttaccgcccatggaatagccctgtacctttgatgttttactggtaccagactttacactcatccccatataatcccggatttctgcagaaatatcaggtgaaatggtctgcttcaagacggtaggctctatggtttttaccgtttttcccttatcatctactatccggtttactacatgaggctgataataggttcctccattgattacagaagataatgctgccagttcctgaaccatggtacaggtaaatccctgaccaaaagaactagtagccagttcaacggcgttcagggtatctttggtatggaggatacctgtaccttctccgggcagatctatcccggttctgcttccgaagttaaatgtcttctgatatcgcagaaaggtttccgctcccatcttttttccgatggccatcagaccgtcattgcaggaattttgtattacctctcccagagactgtgtaccatgtgcgtccggataaatcgagcacttaataaaccgatccgctacctgctgcccgccgtcgcacacaaaagtgtcgttctctgtgatagcacctgcctccagagcagatgccacgatgactggtttgacagtagagcccggttcataggcctctgtcacacagtaattctgccacatggcattcagagcgtccagctgagtctcatcattcattctcttgatctcttcctctgtataaattcccgtgagatccctgggattattcaggtcataaggatctgagcttgccatacccaggatctcccctgtattgggatttgcaacaattactcctatattggcagccccttttgttatcttttttgccttggaggagtcttcctcctcatcttctttcttatcttcttttttgaagttttcttttgacatcgctgtgtcaaatgcactgatatacttctcaattacctgctgtatattgacgtccaaagtggaaaccacactgtttccatttaccggatcaataatagtctgttccaaatcggagtcctgattaaaatatccatattttctcccatccactccattgagggtcgagttataatacccttctattccccaatctgccacattaccagcaaatgtaaatcccagtgtatcacatgccagggcattcatgggatactttctcagataatcctcctcaaaccacacgccctgtacatttttcttctccagcctctcttcttccgagagtttgctgtcttcaggcacagccgtatacgcttcaaaagcttttttttcatccatggagatttcttttttcagaatctgatactggctgttctttgtctgttcattggtaagaagcccgcgtatggtatcctcgtccagccccagctgttccgtaagggccttaaccgttggctctacgtaatccttatttgaattgactactttacagtccaaaattacattataaaccttactgctggttgcaagcactgtcccgtttctgtccgtaatatcccctcttttaaagggaatggtcctgctgtcatattgctgctgggactgtattaaaacttgctttttatacttatctccgcttttggcgttaatataggttattcttaatgttaaacctactaaagccagcagaaccaaaataaacagtcctgccagcttttttctcatggttccactcaattttcttttctgtttcttcctgcgttccaatttactcacctactttgcatccggtacatctctatactgtcttacataactgcttcccttggtgctgtaacgaataatctggtcttcctgggcgtaacccatccccagtttattaatcgccacctcccgaatatggtccaaatctacagatgcaagtgtctcgctgtaaaaagcatcattatccgctttcagctgactcagctgtgtctctaatgatgccacttcctttgtctgtgcagtaatcactgccttcagttgaaggaattgcacgcacgcaaataaagtagcagtacataccagtgccaaaaacacaatataacctttatttacctgcagtgctttcgcacggtttctccgcgccctgtggctgacctcccggtttccccttaccggacgttcctgccttttaggcgctgtctgcacacttcttactgtatttccttctatataagaatacctggtattccctgaatttctcgtactcaccgatctttgatttacccttcgattgcctccactagccatactttactccttactttggcttacgtaagacgccgttcaaaaacccttagcttggagctttttgcacggctgttccgtgccagctcctcctcccctggtactattggctttttcgtgataattcttcccttgggctttttcccgcatacacataccgggaaattactgggacacgtacagggattctcatttttcctgaagatggttttaacaatcctgtcttccagtgaatgaaaggtgatgatgcagatacgcccctcgtcgttcagcatatcaatcatatcatccagcgaatctctcaatacatccagttcatggttcagctcaatccgaattgcctgaaacgtcttcttagccgggtgtccgcctactgcccttattttcataggaatcgctcttttaatcacctcgatcaactccccagtcgtctcgatgggatgctcctcccttgccaggacaatatgttttgcaatgttttttgcaaatttatcttcaccgtaatcgcgtataatccgatacagttcgttttctctgtaagtattaacaatatcccttgccgtacggtcccctctttggtccatacgcatatccaaaggggcatcttccctgtaggtaaatcccctttccgcagtgtctaattgataggatgaaacccctaaatctaatataatcccatccacagatgagattcccaacttgccaagctctgctttcatattgcaataattgctgcgaatgagcgtcacctgatcttggtaatcccctaaacgttcacccgcagccatgattgcagcatcgtcttgatctatgcctatcagtctccccttggcagataacaacttacatacctctaaggcatgaccgcctcctcccagtgtaccgtccacataaataccatccggctttacccgtaagcctgtaatggtctcctccagtaatacagattgatgtttaaattccattctaatctcctgtgtccgttttacagccgtcagatgacaattcccatgtcctgcatcccttctgcaatggcatccatgtcatcaaaactgctgttttctatccacttctctttgctccatatttctattctggtaatatttccagtcagcacaacatccttttccagaccagcgaattcccgcagtgtagatggaacgagaattctcccctgcttgtccaattcgcatgaagtagcactggagacaaagaaacgtgagaaggttcttgcatttttattcgtaagtggtaaggcttttaatttttcctcgaaaactttccattcatcctgtggaaatatagacagacaaccatctaaacctttcgtcaaaatgaactcttcccctaattgttctctgaattttgacggaatgatcaatcgccccttcgcgtcgattgtatgactatactctcccatgaacatgaatgtcaccttctttcgtggaactgcaagtctcccctttgcacttcccgcggcaacctgtgaatgctctgccacctatcatccacttgccaccacttttcaccactttctaccacttatgtacccattttatactaatcacccctaaaaaacaaggggaacatatgttttttcataaatctttcacagaaaaaaagcaggacaaatcacctgcaaatcagatgaaatgtcctgcttttttcttttttactatatctggtagagagcactgaaagcgcctactatattatgccgacgcctctgcctctgccatatactcctcaattagtacatccagtttaacactgtctctgtaaacttcttccagcttgaaattattccctatcttttcatccatggcctgtctcgcagcttctatctcgtgtctcaatcgttccaatcttgtcatatgcatcaatctcctttgtatttatccatcattttcccgttcaggataaccagagtccccacatgccatatttgcctatctcccaagtttgattatctacatagtagtagtctcttttttttcagttcttatacattaaatcggaataaaatcacatctccgtcctttaccacgtagtcctttccttccatacgcaccagccctttttccctggcccctgcataagaaccacagtccagaagatcctgaaagttcaccacctctgccttaataaatcctctctcaaaatccgtgtggatttttccggccgcctgtggcgcctttgtacctactttgattgtccatgctctggtctcatcttctcccgatgtcagataactgataagtcccaacagccgatagcttgcctgtattaacttttccaggccggattgcttaatacccaaatcctccaaaaacatttttttctcttcatcgtcaagctccgcaatctcctgttcgatctgcgcacagatcacaaagacctcgctgccctgttcccctgcgtactccctgactttttcaaccagactgttggaagacccgtcgtctgccagatcctcttccgctacattagccgcatagatcactggcttacctgtcagaaggttataattagctatatactcttcttcgtcttccgtcccgcacgcaaagacagaggcaggcttcccatcttccagatgggctttcagtttttgaagaagttccagctctttggctgcctctttatcgtttctggcagattttgatgttttggcaatccgcctctccaatatttcaatatctgaaaagatcagttccagattgatcgtttctatatctctgagaggatctatactcccgtcaacatggaccacattgctgtcttcaaagcagcgtactacatgaacaatggcatcaacctcccggatatttgccagaaactggtttcccaatccctcccctttggaagctccctttacaagtcctgcaatatcaacaaactctatgactgccggagtcacttttttagaatgataaaaatcacccaaaagctgcagacgctcatccggcaccggtactactcccacattgggatcaatggtgcagaacggataattagcagactccgcccctgctttggtcagggaattaaataaggtactcttccccacattgggaagtcctacaattcctaatttcatatgttaaatcctcttttcttctatgttataagcagccgctttttattgcttatggtaaattctaacacacataataaggcgaatcaagaccttgacccaccctatcactcgacatttctcatttttttatcgacaattttcgcatcggccctttatgcttctctatccttcgacatcatcataagcagcattccctgtcggtattttacgatcgctgtatcctctgcaatctcgttgcttacccccagaccatcgctgtttttcagataatggtcagtcaggggatatttgaatccctccaatgtcagtccctctaccgcatcccccagaggaaaaaaggaaacataggttccaaattgtctggatttctccagcatggtctctttccccagaagcgtaatataattctggggatccacaatgactgccggtataccggcctggtgggccaacgccaggcactgtacatttccccagaaatgatccatacgcccgcctgttgcccccaggatccatatgcctgtactttttaattcaattgccttttcaattcctatctgtgtgtctgtggcatccttttccggctgaaaccgctccactggaatcccggggttattcatgtaatactccatcactcgggaatcaatgctgtcaaaatctcccattatataggaaggaagtatctcatgctgatagcagaaattcagccccctgtcaatgcccagtatataatccggcctcatctctgcaataaagttcagggcaaacttctcatccagagagccgccgctaatcatcaacgtcttcatattcaggcctcatgctccataagttccagcagctcttttgcattctttgtaatatctcctttaaaaacagcagagcctgctacaaaaatatttgcacccgctttgagaacttcaggcaatgtatcggtggtaatccccccgtcaacctgaatatccgtatccagtcctcttctgtcaaactcatttctcaacacagcaactttacgggtgcagtatggtatgtacttctgtcccccgaatccgggattcacagtcataatcagcaccatatccactgtatccagcacatgctccagcaccgagacaggagttgccgggttcaaagccaccccggccctgcatccggcctccttgatctgcgctatggtgcggtccaggtgggtgcacgcctccgcatggacggtaagcatatcagccccattattcataaacgtatctacatatcttcccggatctgaaatcatcagatgcacgtccataaataaagaggtttcttttttcagtgaggccaagacaggcatgccgaaggaaatgctgggcacaaagatcccgtccataacatcaaaatgaagccatctggttcctgcctcctctactttcttaatctgctctcccagacggttaaagtctgcagctaatatagatggtgataactcatatttcatacctcaatacctcctcttgtcttttagttcctcataaaattctacataattcgcatagcggattctgctgagttcccccttatccagggcttcttttactgcacatcccggttcatgggtatgagaacacccctggaaccggcaggccccctcatagggagcaaactctataaaatagtccttcagttcttccttttccatgtccgcaacatagagtgaactgaatccgggggtatccatgatgtaagtgccctcgtctatctgtatcagctgcgagtgccgggtggtatgctttccccgtcccagcttctggctgatagctcctgtctccatctcaaccccatgctgaacaagattggtcagagaagatttccccacccccgaaggtccggccaccaccgtagtctttcctttcagaagcgcactcatctgctccaccccctcttcctgctccgcactggtggtgaaaacctcatatccgcacttcttatattcactgataagcagctccagttcctcccctgtaaccaggtccttcttgttgatgcagatttttgtggggatgccctgcttttccatggaaatcaaaaagcggtccagcaatgagaagttcggtttcggctcctgggcggcaaatatcaccattgcctgatcaacattggcaacggctggccgtatcagttcatttcttctgggaagtatctccaccagattacctactctgttctcctcatcaaggacctctatgattacatcgtcgcctaccagcggctttttcttttcttttcggaatattccctttgccttgcattcgtaaatcccggattctgctacatgaatgtagtagaatccggcaattcctttcactatctttccctgcatgtattaatctacctgttcaaacttcagatttttatatgcccccagcatcgtgtactcaccatctactttctcatagacatatatagtaccagttgtaactcccggctcaccctcaacattctttaaggaatacgggaactttaacttttcatccgtaaggatcgtttttgcctgaatctcgccatccacttcctgagccaggtccatcttaatctcaccgcctttgtatcccggaggtgaagctatctgctgcccaacgcatttccatgttccgctggcggatgtgttcgtgctggtgttgtcatcctttttatcggtatcagagtcattatcggaactgtttccggtgtttactgtaatggtaattgtagtcccggcttccacagaacggcccgcagagatatcctgcttcatgacatccccgatgtccacactgctgctggtaccgctttccactaccacgtcaagccccagttcattcagcgcttccttggcatctgcctctttctgccccactacattgggcaccttcactgatttatcgccctttccgatgctaacttttacggtaatggtgtcgccctttttggcactttctccggctcccgggtctgtggaaatcaccttgccgatatccacggaatcacttttctccttctccaccttggtctcaaagccctggtcctggagcgtagcttccgcatctgtctgcgtttctcccacaacatcagccacacgaatctcatcgctgcccgtacttaccgtatattttatcatagtgttcttatcaacttttgtaccggcctcaatctcctgctttataatcacacctgcttcatattccgtagaagcctcttcgccggccttcttaattcccagagagttgtctgaagccagtttctgggcttcctccactgtctttcccaccagttttggaacctcaacctgtgcatcctcatcattcttgtctgaggtatcctcaacctttggtttgttattttctttatttttcgaaccgaaggtaaaaatccctgctgcctgaccgataagatagattaaaatacagataatgatggcaccgacaatcagtccgcctatggtaagagctttctccaggcgggtattaatgccgccttttctgccgtcgtcgtagtcatcgtcgtaatcatcaccgtcttcatcctcctcatactcatcgtactcctcatcctgtgggggataggagggctgggtgtcaccatagcggttcttcttaatctcattcagctcatccccggaaatcaccacggtctgcgcgtgattgctgaggggaaccagattcacaaagtccccgtccgggtctatcagtgaatgcttcaaatctgcaattacctcagccatactgttgtagcgccggtcaacacttttctgcgtacacttgagaattatctgctccaggctgtggggcagctgagagttatactctgaaggaggaacgatttcttcctgcagatgcttaatggcaatcgccactgtagtatctccgtcaaacggtacttttccggttaccatctcatagatagtaacgcccagggaatagatatcactttttgagtcactgtatcccccccgcacctgctccggggagctgtaatgcacagaccccataacatttgaactgatcgtgttagaggatgcagcccttgcgatcccgaagtccgttacctttacttttccgtctgttgaaataataatattctgaggcttcacatctctgtgaacaatgttatggttgtgcgccgcttcaagtcccatagatacctgaatagcgatactggttgcctcttttacacttaatttacccttcttggagatgtactctttcagcgttataccttcaacaagctccataacaatatagtaaacgccgttatcctcccctacatcaaacacatttactatattcggatgtgccagccctgccgccgcctgggcttctgtctgaaatttccggataaatgtcatatcctcccggaattcagcctttaatacttttacagctacaaagcggttcagtttatgatctttcgccttgtatacatctgccataccgccggatccgattctgccggcaatctcatatctttctccaataatcattcccacatttaacatacttccacctcttttgtacctggttttactagtaccaccgcaatattgtcctttccaccattttcattcgccaaacgaatcagactttgtcctgctgtctccagcgagggagcttcttttacaatctgcgcaattacatcatctgttaccatattagtaaggccgtcggaacacagcaaaataatgctgtccggatgcagcttgatatcaaaaaaatcaatatccacttcctcttttgcccctaacgcccttgttattatattcttatccgggtgatttctggcatcctctctgctgatctcacccatgcgcaccatttcctctaccagggagtggtcctttgtaatctgacggattccgtcatccatgacatacagacggctgtcacccacatttgccacataagcataatggtcgactactgttaccgcaaccatagttgtacccatgccggacattccctcgtttttagctgcctgctccagcaatttaagattcgcattttcgattgccttacgaataatctttatgggattatactccgcatctgccttgacggtatcaagcaaaacctgaacggcaaaacttgatgcaaaatcacccgcattatgtccgcccatcccgtccgcaacaacaaaaagattgggcaggttaccgacagcctgctctgatgcaaagacatagtcctgattcacttttctcttctgtcctacatctgtcacagaataaactttcatccttgcgtctctctttctttcttatctatcaagatatatttctttcgtaattgtccacaggctccatcaatatcccggcccatttctcttctaatagtaacattaattccgcatttttcaagtttattttgaaaattaactataacttttttatcggactgcacgaaatcccgctccttgacaggatttaccggtatcagattcacatggcaattcagccctttcaggagtgcagcaagctctgccgcgtcttccggcgtgtcgttttttcctcctaccaaactgtactcaaaggtcaggcggcggcctgatttctcaaagtaacttctgcatgcatccatcaattctccaagttcatacttattggctacaggcatcagctccctccgcttttcctgattggaggcatgaagggaaatagccaatgtaatctgaagtttttcttcagccagctgccggatcctgggtacgattccgcaggtagatactgtaatatttctctggctgatattcagccctttttcatcgctgagcatgcggataaaccgcaccaggttgtcataattatccaggggctctcctgttcccatcacaaccacattagacacacgttctttggataacttctgaatctggtaaatctgatccagcatctctgacggcagcagatttctggtcagccctcctatgcctgaggcacaaaaccggcagcccatccggcagcccgcctgagaggatatgcagacagaatttccgtgcttatacttcatcagcacactctcaatcacatttccatccccaagggcaaacaagtatttctgtgttccgtcctgttttgatgtttgaacttccacgggtttcagacaagtatatggatattcttcctccagtctctgtctcagatgctgaggcaggtttgtcatgctttcataactgtccgccagttttacatgcagccactggtacagctgctttccccgaaaaggcttttccccaagttctgccattacattctgcagttcctcagctgtcaatgatttaatatctaatccttccatctcctacacccttctcaatctggctataaagaacccatcactctcatgaaccccgggcagcagctgaagatatccctgtccggtagtctcactatgtagctcttcacataagtagggatccagagattccggctgaaagggataatgattgacaaaccaatgtatgttgtcctggttttcctcccttgcgatcgtacaggtactataaatcaggattccccccggccggacataggcagcagcattttccagtatcttcctctgaagcttgatgatctgttcctgcttctcaggtgtcatcttatattttatatctgtctttctcccgatgactcccagtccggagcaggggacatccgccaagactatgtctgcactgccggcagtctcctcctcataaacgcatgcgtccctgcagacagcttctatatttacagcatctgcacggcgaaaattttcttccatcaactgtactttgtactcgctcacatccctggcttccacatggccctgtcccttcatcttatctgccacatggagactctttccgccgggggctgcacacagatccagaattctgtcccctgggctgggggctgctatctcccctaccagcatagagctgacatcctgtacctgtattctgcccatggtaaacgcatgaagggccggcagataatcatattcagagatatagtaagcggtttttatataaggagccttctccactttaaccccctggcttctcaggctggctatggtgtcttccgtagaattaagatattcctggcagcgcacggccgtgggacgttcttgtaaaaatgccttcagtatagtttctgtggtctcaaagcccagctgatccagccatcggactaccagccataccggcatggagtaggtaactgagagatattctacgtggtgctcctttggaggaaaagcaagcttcccccgctccctggctatagtacgaagtaccccgttcacaaaccccttcagactgtaaaatccttttttctgggcaagctttacagcttcgttgcatactgcggaatcgggaatgctgtccatatagagcagctgatagaccccgcttctgagtatctccctgatgacaggcttcattttattcaccttgacattggaaaactgattaatgatataatctattttaagccgatattccaaagttccctcacacactctggtaataaaagaccggtcctgctttgacagatactggtatttccccagagtattgcggattgcaatatggctgtattccccctctttgttcacttgcagtaagattcccaggatcagttccctggtattaatactattaatcatcccttcttgttcctcctgcgagtatcagcaaacgcagcagctgtaatatggaggatgcgagtgctgctacatatgtcagcgctgcagccttcagaacttttctgccgcctcttaactcctcttctcttaaaattcctgtttcctgcagcattgcaagggcccttctggaggcattggtctccaccggaagggtcaccagctgaaatgccactgctgctgtaaataatacaatccccaatgtcagcaatgatggtacggaaaagatcagaccggcaaagaataacggccaggacagggctgaacccagatttgccacaggaacaatagcgcccctgaccgtcagaggaagatactgtctgttatgctgtaccgcatgtccgcattcatgggcggctacacagacagcagccacagatgtgctgccgtatacgcttcccgacagccgcagtacttttgttctgggatcatagtgatcggtaaggtttcccccggtccgctcaatatgcacgtcatgaatccccgcatactgcagtattctctgtgctgcttccgctcctgtgattctgctgcggttctctatcctgctgtaccggccaaatgtgctgttcatactcgccgatgcccatacacagataagaagtccaataataatcagtaaatacgtaggatcaaagccccaataatatcctgtcccaaatggcataccatcactccttgctgtctttcaatctcgttccctcagggatctcatatcccctcagaaacgcccctgcttccattcttttctttccttccagctgcagttctttcacacacaagaccttatctcctgtctggatataaagccctgttttatctgtacgtaccacttcacccggctctttcccggattcctcagaaagcacatctgcctcccatattttcagggttttcccctgaagatacgtataggcactaggccacggattcagcccccggatcagctgttctatggtctttgccttttcttcccattggatacatcccatttttttatctatcatactggcatatgccgtcggactttcttccggctgcttctcgtagactgctgtctcattttcaatagacggcagagtctgcacacacagcctggcgccagctttggccagtttgtcaaagagacttccgccggtttccttgtcctccagaggcacaatttccttggaaatcatatcgccggtatccaaacccgcatccattttcataattgttaccccggactctttctctccgtcgatgacagcccattggataggagccgcacctctgtatttgggaaggagagagccatggacattgatgcaaccaaagggggcaagctccagtatctcctgaggtataatctggccaaaggcaactaccacaattatctgaggttccagttttcttaaaatctggataaattccgggtctctgacttttttaggctgatacacagccagtccccgggcaatagcagcctgctttaccggcggggccataaggttcttccctcttccttttggtttgtccggctgggtcactacaccggcaatgtcatggccggcttctatcagagcctccagtgtgcctaccgcaaaatccggggttcccataaagacgattctcattctacttcctcctcgtattccgcattagtactgtggagatcaccttccaccaggtctgtataaagtttgccgtccagatgatccagctcatgacagatagctcttgccagcagatcggtgccttccagaataaattcttccatattttcatctaaggctttcactttcacccagtctggtcttgtaacctgtccggccatgccgggcacacttaagcacccctcatcccctgtctgttcccctgacgtctccagaatctccggattgatataagccctggggctgccgtctgtatcaatgacaacaattcttttcaggacacctacctgaggtgccgcaagccccacacccatttcctcatacatggtatcaaacatatcgtctatcaattcttgaatctttggtgtcatctcctccaccggtctgcactttttgttcaaaataggatctccctgcactcttatctttcttaacgccatacctgtcctctccttactatatttatagtttatacattaaaatcaaattgaaccgtaatcttgtcaaatcctttatttattctgatataacgctccagctggttttttatccatatcagccgttcattctccccgtgcttcagataaagtaccatacgatacatatcatttactttggaaatattctccggtgccggccctatcagctgcagctcactctttggataaatcttttgaatatactttcctatataatgcattccctgctgtaaaagcgactcatccctgcaggcgccccgtatggcgagcattgaggctgcgggagggtatcccatgagcagtctgtatgagatttcttccctgtaaaattcttcatagtcctgatgtacagacgcctgaatgctgtagtgttccgggtgatacgtctgaatcacagcttcccctggattttttccccttccggctctccccactgcctgcgtcagcagctgaaaggtcctctcactggctctgtaattctctgcaaataaagacatatctgcggcgagaacgcctaccagagtcactttcggaaaatcatggccttttactatcatctgggttcccaccagaatatcggcttctttactggcaaaagcggcaagaattgtctcatgtccattctttcccttggtagtatccagatccattctcaaaatccttgccctggggaacatcttctttacaatctcttctatctgctgggtccctgcacggaatcctccaatatagggagaaccgcattcaggacatccggagagacttggcgtctcatatccgcagtaatggcataccagcctcccatggctgtgaatagacagcgacacatcacagtggggacattttactacgaagccgcaggaccggcaggccacaaacccggagtagccccgccgattgagaaacagcataatctgctcccggttatccaggcgctcctggatcttatcccggagcaatttacttataatagatcgatttcctgtttttaattcttcccgcaaatctacagtatataccatcggaaggctgcttcccgcaaaacgggaagacagggaaaccatatgatagattccctgctgccctttataataggaatctacggaaggagtagcggaccccataaggacatatgccccttccattcgggccctctctatggccacatccctggcatggtatctgggagtgctttcgctgatataggaggattcgtgttcctcgtctataataatcagccccagcttctggaatggtgtaaacaaggcggaacggggacccaccatgatctgtatcttcccctctcttgccctttcaaactggtcaaaccgctctccctgggacattctggagttaatcacagaaacgcgttctccaaaccgaaggtaaaaccgtcgtaccgtctgataagtgagggcaatttctggaatcagaacaatgatttcccttccctcctccagaattctctgaatcatctccatatagatcagcgtttttccgcttcccgtaattccgtgaagcagacagggccttggaacctctgaagcccattcctcagcaatccgtaccgctgctgtcctctgctcctcggttaaagaaatctgttcctcatttccctccactggccccagaggattccggtacacggttgacacttcctcggctactgcgccattttctatcattttcctgacagcggccggagaaacatgaagtgcttttatcgcaaattcataatccatatctccattttccagaattgctgacagcagcctggctctggccgcatatttttttctttctaattctataagcaactcctctgcctctttggggggcaaaacaagccttaacctttttttctcctttgccttcatcttttttttcacaggaagaactgttttcaatgcctgattcatagttgaaccatactgctcacgaatccatgccgccagcgctatcagtttagactccaccgtaattcccccggattcaggacccagaatttctttcattttttcggtgtcataccgcgcgtccacggagatgcctgttacataccctgtaatctcccggttacctttcccaaaaggaaccctaacctgcatgccgatgcagatgtcttctctgagagcctccggtatcttatactgaaaagtacgatccaatttttcctgagaaatatctacaattatatctgcataccattcgttcattttattagtttcctgccagaatatcagcgatcagaaccctctcatccattggatatttttttccgttaatctcctggtaatcttcatggccttttccggccaatactataatatctccaggctcgccgtgatgaatcgcataggcgattgcttcctttctgtcagcgatctctatatgctttccgtctgttttttggattccggtcacaatatcgtccataattgcctgagggtcctcatttctgggattatctgaagtaataatcgtaagatctgccagtcttccggaaacctcccccatctcgtacctgcgcatcctggaccgatttcctccgcatccgaacacacagacaagacggtgcggatgatattcccgcagggtatctaaaagactctccaggctcatagcattatgggcatagtctatcatcagtgtaaaatcatcagacactttgaccatttccaccctgccttttaccttcgctgacttcagcgcctttttaatattttcctctgatacctgaaaatgccggcagattgcaattgccgtaagagaattatagatactgaactttcccggtatatcaatctccacagggaactccagcagtcctttcacatcatagctgatcccaagataccctggacgggcaaccatatgggcattaaccgctctgagatctgcattgccgccaaagccaaaggtctccagcctgcaggtagcgtccttaataatttgttccagatgttcatcatctgcattgacaatgcctacccggcactgtctgagcagcatagctttgcactggagataatgttcaaaacttgtatgctcatttggtcctatatgatccggctcaatattggtaaagattccgtaatcaaaggtaaatcccgctgtccggtgaagcatcagcccctgagaggaaacctccatcacaacgcagtcacatcccgcctccaccatcatggaaaaatacttctgtatcacataagactccggggtagtgttggctgctggaataactctgtccccaataatagcttctatggtgcctataagtcccaccttatatccggcgttttccaaaatagactttaccatatatgtggtggttgttttgccctttgtaccagtgatcccaatggtcttaagcttttgggcaggatgatcgaaataagctgctgaaatgcatgccagagcatatctggtatcctccacccgaataaccgttacgtggtccggcacagacacctcttcttccacgataagaaccgatgcccccctctctactacatcaggtacaaatctgtgtccgtctgacacagcccccctgatgcatacaaaaagagagccttcgaccacttttctggaatcaaagaccacatcctctacctgtatatctgttgtcccctggcaacaggtatattctatttgttctaataacgaagataatttcatgtgcaatcctccataccttttatcttattctttattatgcaggagataccacctgcccgctcacaggacatgcccaaagaactgtccctgggtattctatataatataagaaattctaagtaacagaataccacatgaacccataattttcaatcaggcatacctttgcttttcctttccttaggattcttttccgcttttcttaagatagtttccatattatttataatttgtacatacttttatcacattttgtctatataatgaatcttggatagttgataaaccactcactatctcccccctcaagttggaaaagcccggtactcgcgtatcgggttttttcttgctttttcctatttttcacactataatgggacatagaatattacaccattaagagaggtatattatatgaaaaaaacaatagttgtagttgctctgggacacagggcactgggcactactcttcctgagcagaagcaggcaacaaaggagactgcgaaagcaatcgccgatctcgtcgagtgcggcgctcaggtggttatctcccacagcaatgcgcctcaggtaggtatgatccatactgccatgaatgaattcggaaaagtacatcccgattatacctttgcgcctatgtccgtatgctctgccatgagccagggctatatcggatatgatatccagaactccatccgtgccgagctgcttaaacggggaatctataaaccggtatgtacggttttaacacaggtaaaggtagatccctacgatgacgctttccatgaacccacgaagatcattggccgttatctcacagaggaggaggctgaggcagaagaggcaaaaggcaattatgttataaaagaaaaagaaggataccggagaatcgtagccgcaccaaagcctcaggaaattattgagcttgattctattaaggccctcctggataaaggacagattgtaatcgcctgcggcgggggcggaattcccgttctggaacaaggggtggagctacacggtgccagtgctgttattgaaaaggatctgtccagcggaaagcttgctgagctcctggaggcggatcaactccttattctgacaagtgtggagaaggttgctctgaattatcagtccgattccgaagaactgattggcagtatttctttggagcaggcaaaaaaatatatggaagagggtcattttgaacccagtaccatgctgcctaagtttgaggctgccgtctccttcctggaaaagggacagggccgaagggctgttatcacgtccatcacaaaggcgaaagacggttttctgggcaaaacaggaactgttatccagtaagtacgcttacttctatatgtacaaaaatgcagagaatgccggggaaggcattctctttttttacaattttctttgtcccaagcgtaatttttcttataaaatcggcattttcttctcttcctacacattgtatgaaaagattcaaaatttgccaatacattgtggtattttcctatcaagcaatttttggtagaatggacatgtagaaaaacatacgtgcattaggaggtgccatataatgattataatcggcgagaaaatcaatggttctattccgccagtagcaaaagcaattgcggaaaaagatgctgaattcatcaagcacagagcccaaattcaagcagacgccaatgcgacttatattgactgctgcgcatccgttgaggaaagcatcgaagttgaaactctccactggatgatcgatttaattcaggaagtaaccgatgtgcctatctgtattgatagtccaagccctcattcatgtgtagcggcgattcctttctgtaagaaaccaggtttaataaactctgtttccatggaaggggacaagattgacgtaatcttcccagtgattgcggacacaaaatgggaatgcgtcgctctcctctgtgatgacaaaggaattcctaattctgtagagcgcagaatggaagtattccacaatgtcatggagaaggcaaaagaatatggaatagcaccatctcgtttacatattgacccattggtagtaaccctttccactgacgaagaagccctcacaacctttgcagagtgctgccgtcagatcaaggcagaatatccggatatccacattacaagtggtctttccaacatttctttcggacttccggcccgtaagaacatcaatcaggcattcatggtattagctatgaacgcaggtatggacagtgccatcgtagacccgaccaaccgtgatatgttaggtatgatctatgctacagatgctctgttacagaatgatgagtactgtctggaatacatcggagctttccgtgaaggattaatcggacctgctcccaaaaaataatacaggacactattaaatttatataatttattaataaggaggatattaatatgtcacagattcaagcagttgcggatgcagtatgtgcaggaaaagcaaaattagttggtggtttagttcaggaagcattagacgcaggatgtgaaccattagagatcttaaactccggtatgatcgatgcaatgggtatcgttggtgagaaattcaaaaacaacgaaatcttcgttcctgaaatgttagttgcagcacgtgctatgaaaaaaggtgttgaggtgttaaaaccacacttaagcgcaggcgatacaggaacagcaggcaaaatgatcctcggaacagttgcaggcgacttacatgatatcggcaaaaacttagttggtatgatgattgaaagtgccggctttgaagttatcgatttaggcgttgacgtaccaatcgaaaaattcatcgaagcagtaaaagaaaatcctgatgttaatttagtaggactttccgcactcttaacaacaaccatgccagctcttagagatacagtaaaagctttaaatgagcaggatttcagaagcaatatcaagattatggttggcggagctcctattacacaggaattcgcagatgaaatcggcgctgacgcttacacagcagacgcagcttctgcagctcagaaagcaaaagaattagtagcttaacttgccaaagtttaattccttgaaaatcacgaaaaagacggtacttttagtatcgtctttttcacgttattataaacagaaccgcttgtacctgtaaacttctctcaccgtccccttgttctctaaaaatcgagtaggaagcggtgattcaccgctaccgtatgggtcgtaaaccaatgacctctccggctgtttcctgcctgccttgccaaatcttccggtactcccattttccgcaggttcttcaccttggttttcggtttcttccactggattaccctttcgtccttcacatttctgcgcaggatattcacaagtatctcatggttcagagtgtcgaagtatttccacaagtctaatgctaccgcatgggtatatccctgctctgcgtactcttttaccttctcaatggcgtctttcgcacgtcttcccgggcgatatccgtaactgttctccgagaacaacggctcgtatatcggtgtcaggcactgtgttatagcctgctgaaaaatgcggtcttttacggttggaatgccaagcttccgtattccaacgtctggcttgggtatctccactcgtcttaccgggtccggggtgtactttcctcttctgattctctcgataagctctttctggttctccctcaggtatgcgcctatttcctccacggtaatcccgtcgattcctggcgctcccttgtttgcccttactctcttaaaagctcttttgaggttgcccttctccagtatcttctccaaaacttccggctgtgcactgtccctttccttccatatccggcggaaagaacggtgcgctctcacatacccttcacgttccgcgctatctctttgtgatttaccatacatgattccgtgtagttattgggcttcaacttgtggagcagtcttaccctcatgcatagcctgatgtgatttctgttcgtcagaccagagatttgcccatgggttagtatgttccccatatccagcttccttcagattccacctcacgatggacacccttgccttcggctatatccttcccactaccgggcggatttcggacttgcaccggttagaaacgtgcgccgccgggcgcactcccaaaaaggagccgctgcacaagcagcggctcccaactatcaatctctcactatgcagccttcttcgaggcaagaatctccatacgttttactttcgtaagcttcatccatgcaaatgtagctattaaaccaactacagaaactgcaagcagaattccgaagaataccttatatccctgtgcaccagcccagtgatccagacagagaccagctaccattggagcaaacagctcaacgctgtatccgattggtgtaataatggcggttgcagtacctgtgatttcatgaggatattctccctcttccatgatagcaaagtgcatagactggcaggcatacatggaagcatagattgcagcgatgaatatcagaagcatccaaatcagtgacggctggcctggagtaaagataactcctgcaatacccacaatcataatgatgtaagcaatggcgcatacctttgaggacccgattctgtcagctgcaaatccggatacaaagcatccgataggacggcagtactgtgaaaagtaacctactgctgcaccgataaccgctgttgcaccgaatacttctgttgcatatggtgtgatatagaaatagctgcagcacattgcataggaacagaaaataatcagacactgaagccatgtggtaggcagtgataatactttctttaatgcctttacgtcgataatagcctttgtctctctcttaaattcaggctctttgtacatggtaaataccatgataccaagcaatacgttaattacagaatatgtagcaataacagaagataacgctgctttatcagatattttaactgataaataaccaaacagtgccaggatcagtgctgactgaaccatattcgtgataccacgtccaccctcaaacagaccaaatacacggccctgctcatctgatgttccaagagaacgaagagcctttaccagtgcgttccagaatgtaagaatggatgtaattccccatacagcgtgaatcaggaatacaaccggataaggtggatataacagtaaaataaatcccaaacctccggttacaataagagataaggtaagcagctttcttgccggccagcggtcagcacagaagcctccaaggaaataagcaatgatggcaaatccgccgtatgcactgcccaaagctcccatctgtgtgtttgtcaagtcaaaatatttaataaatgtgtcataataatagcttctgaagtagggaagcgcatataccaacgcaccggatatgattaagataatcagggttggcaaattcttcatcaattttccttcttttttacctgccataaataactacctcctaatagttgtttttacttttaatatttaagaatgtgatcttccatttttttggaagtggatgtaaatatgtggcatccgtcttttgtaacaagaatatcatcttctattctcacaccgcccacaccttcaatatagatgcctggttcaatggtgaatgtcattccttcttccagcaccagctgattatcggaggaaatattaggttcttcgtgaacacttaatcccagtccatgtccggttctgtgaaggaaaagttctccgtaacctgcttctgtgatcacatctctggccgccttgtcgatctcacaggcctttactcccggttttactttggcgattgccgccagattagctttcagtacaatatcatagatttcagccagtttcggatttccaacatgccccaggaacaggcagcgggtaatatctgaccaatagtgtttataataagcacagaagtcaaggagaataatatcaccatccttgaacgcataatcgccgctgaccccgtgagggttcgcagaattatcagcacccagtaccaaaatgataaactcatctgtaataaaacctggataggttgacatataagagtaaagcatcatatttaattctttttctgtcatgccaggtttaatcttgtcagatacgtaggcaattgcctcatctacaatcttagcagcaaactgcattgtttcgatctctgtctcgtctttgcacattctaagttttgcaatgcaagtgccgatatccgcaacttcacagcccaggctgtgaaaaatctcaccaattgccattgaaaaatacttagtctcaactgccagttttttgcagtctcctactaccttcttgattgcagcggccgggccatcactgtccagatatgtaacctcttccaccgtacccttcatacagccggtgtcaacactgggatttaccatagttaccgtctccgcattggcatccataaccagcccatagtatctctcatagggaataatgctgattcctgtaagataattaatggacataggatccccgatgattgccttgtcaaatccctgctctctgagaagttcacacgccttctgttgtctggcttttaatgcgtccataaatcgcacccctttccttttgcctttttcactttctacctacaaatttcacacacatgattctttttataaataataacatttttccggaattttttcaaataaattttatactttttttcgattttttattattttttcattttttattgacgattttttccgtttttccttgtaaatacgccgtttattggtgattctgtacatttgtgatattcattttagaaaaattaaaacgcacattttcatatatataaaaatatgcgttttaatttcatcatagaattggtgaagaacctctttttcgtctcttcctagttattttctgcaaattttacgaatcaaactattgggaatctcaaacacaaagattatcccaagaacaattgcaattgctactgtaagcgtttgacgcccatactgagagcatttatccatttctcccattatcatgtaatatactgtccaatatattcccgttcccggaactaaaggaaaaatacccgaaatcagaaacaaggttgccggacacttctgctttgtggcggctatcctggagcacataattacaaacgcagtggcggcaaagctggaaacctcaatcccaaggcccagataccggttcagtgtaagacagatgagccagccgaacccgccaatcactccacagatgggataatattttgcaggaacaaaaaacaatattgagaacgcaaccgtaccgaggccggctgccacaaactgaagaagaaaatccaatatcatagcataggacctcctgtcattttatagtaaatggtatacatcagtcctactcccaaagcaatcccaaacgtaaccagaagagcgtctatcattctcaccgttccggcaatataatccccatctgccaaatcccgaatcgcattggtaaaggaaacccctggaagaagaggaataatggaaccgatgataatataatccaggtttgtgcccagatgacatttatataagagcactgcaaacatagtagccaaaaaaccacccataatattaaccacaattttggacatattttttccatttttctctgtccatacgacaaaacaatacaaaaggaatcccgccaggaaggccgtaaacgcatcaaaaaaatctcctccgaacacatagcagaaacatcccgcccctaacccggaggcaagcattctcgcgagatctttcttacccttcatcacttcaatagcttccagtctctctctggcctgttctaccgtgtgctttccctcctcaatctcccttgagagctgattcacagccgctacccgttccagatgaactgcattcagagggatgtgttttactctggcatatatttgcttttccttcccctccgcagtgataaagataccgctgctgagcacaaaggagtcgctgtcctccaccccgtaatactttgcaatcctattgatcgtctcctccacacggaaaatctctgctccgctttccagcagaatattgcccgccttcatagccacatccataatttgcctgtccttattttccatcttttatctccccaaaaccggatttgatttgtaatcattatatagcaaaaaaggatgctgcgcaattacacaacacccttcttctgttaagagttcaaagattacgtttaagcctttttcgactgcattttactggctttaatttccatacgtttctctttcgtaatggccatccatgcaaagttcgcaatgagaccgataacagcaagtccggccaaaatgccaaagaataccttatagccctgggccgtattgttccaatgatccagacagataccgccgatgattggcataaagaattctgcactgtatccgataggagttacaatagctgttgcggttcccgtgatctccagagggtactcaccctcttccatgatagcaaaatgcatagactgaatggcatacatggaagcatagatcgttgcaataaagataagaagcatccagatcatagatggctgtccaggtgtaaagataacgcccagaatacccaccagcataataacaaaggaaatcgcacagattttggatgaaccaaatttatctgcacagataccggatacaaaacatccaatgggacggcagtactgtgaaaaatatcccagagcagccgcaataacagctgaggttccgaatactgaggtcgcgtatggtgtaatatagaaatagctgatgatcatagcataggagcagaagataatcaaaatctgaagccatgtagtaggcatcttagctaccctcttcaaaatcttcatatcaaacagttttgttggcgccccttcactttcttctctttccggctctttaaacataaagaataccagaagtcccagtaagatacagatgacagaataaataataataactgcagacaatgctgctttctcggaaactgccttggacatatatccgaaaagcgccaggatcagcgcagactgtaccatattgacaaggcctcgtccaccctcaaagaatccaaatgcttttccctgttcgtcagagttagccagagaacggatagccttaacaagagcgctccagaacgtaaggatggatgtaataccccaaatcagatggatagcgaacaccactggatacggggggtaaagcagcagaacaaatccgcagacacctgtagttaccagagaaattgtcatcaggtatttagccggccagcggtctgcgcaaaaaccgccgaggcagtaggcaacaacgcttgtggcaccgaaggcactgcccagagctcccatctgtgtattattaatgttgaaaagctttacaaatgaatcatagtaatagcttctgaaatatggcagtgcataaatgagagcaccggaaataatcaaaataatcagtgtgggcatatttttctttagtttacttgccccggtcttaatctcgctcattttttcctcctaagttaagccttaatatttaagtatgtgatcttccattttcttggaagtagttgtaaagatatggcatccgtcttttgtcacaagaatatcatcctcaattctcactccgccgacgccctcaatgtaaatacccggctcaatggtaaatgtcatgccttcttcaagaaccagctggttgtcagaagagatattcggctcctcatggacactcagacctaagccatgtccggttctgtgaaggaatagttctccatatccagcctctgttatcacatctctagctgccttatcaatctcgcaggccttaacgcctggttttaccttagcgatggctgccagatttgctctcagtacaatatcataaatctctgccagctttggattgcctacatgacccaggaacaggcagcgggtaatatctgaccagtaatgtttatagtacgcacagaagtcgagaagaataatatccccgtccttgaacgcatagtcaccgctgacaccgtggggatttgccgaattatctgctcccagaaccaggataataaattcgtctgtgataaatcccggataggtcgacatataagaatatagcatcatatttaattctttttctgtcatccccggtttgattttatctgatacataggcaattgcctcatctacgattttggcagcaaactgcatggtctcaatttcagactcatctttacacattctcagtttcgcaatgcaattgccgatgtcagcaacctcacatccgagaccgtgaaagatttcaccaatagccatggagaaatactttgtctccaccgccagttttttacactctcccactacttccctgatagcagccgcaggtccgtcgctgtcaagatatgtaacttcttttaccgtacccttcatacagcctgtatctacactaggattcaccattgttgcactgcatgcatctgcatcaacaactaatccatagtatctttcataaggaataatactgatacctgtcaaataattaatggacatgggatcgccgataattgctttgtcaaatccttctttcttcagaagttcgcaggcattctgtaacctgattttcaatgcatccattcgcttacacctcttcacattttttcgaacaaatttcacacacatgattcttttagtatgatatcattttatcatcaatatttcaaatgtcttttatatatattgataaaatatgtaattttttcacaaatatgaatttttattttgtttattttttaacattattaggttaaaaaatgcagtttcttccaaatatctgcctcatatccggaagaaactgcacttttctaaacctcttcgctgtcatcccagtatctggcccaaaaagagacacagggagttttttcatgcttattaaaataacaatgtctggtatgcgccttgattaatatggtatcacccacattcagttcaaacgtctgctcgtccagcatgatggtaagatgcccggagagtacagtccctacttcatcacattcgtgaacccaccacaaaccgtcagaagaactgtttggttcgattgtcatatataaatatgaagtatttccagtcccgaaatctatggtctccagcctcatattgttttcttcatcaatcgtaacttccctgtcttcttttcttactacgattctggattctgcattgcgttccagaaggtctccaagagaatttccaaacacttcgcagattttctgaatattcattaatgtggggctgctgatatttctctccaggttgcttagatagcctgtggaaaggcctgtagcttctgacagctgctgaagagtcatcccctttgatttcctgaggctcctgatactgtaaccaattttgctaatgtcactcaactttctttcctactttccctctaaaatgacttaaattcatctctttacctcattatactataaaagtatggaaaagcacaatgaaaatctaaaaatatcaggttattttatattggtgaattttaacaaatatttttcacgattagccggggttttcattgactattttaactttaaatggtaatataggcataacaaaacacacacatgaattcataattagtaaaaaaccagtaaaaaacttagttaaagttaaacatggagggaaattatgaactacgtaccacaattaaagtatgcaagtcaggaacaaattgagcagctgcacggatacggtgtagaaattctaaaacgttttggaatgcgtgtagaagatccggaaatccgcaaaatgttatgcgaaaacggctgtaccgaaaaaggcgaccgtgtttatttctgcgatgacctgatcgagaaaacaattaaaaatcagaaaaagcaggtagtgatgacatctaccacaggctctaaattagagatggaaatcggaaaaaccttctctcacagcaccggaggcgctccctggattgcagacttaaagtcaggcaaacgccgcaacggacagttgacagacttaattgacaccatccgcgtaatgaaccagtgtccggaattagatcttccctgtgctcttgtatatccaagcgaagttccttccgccatcagccagctgaaacaaactgctactatgtttgagtattccaagaagccaatctatggccctggtatctccttagcaagcaatgcaaaatatattgttgaattatttaaattatacggcggttctgatttagggaagaatccaatcggtatggtcggaatctcccctgaatcacctttattcctgccaaaagagattactaatacaatggcacatatcatcaaggccggcatcccaaccagcgtcctggcagcacctatgggaggtcttacatctcctcttaccatagccggaacagttgctcagtctcacgctgagatcctggcatttgctgctgttgcctacttgatgaacccgaactgtgtactgttctacggttccagaaccttctttgccaacatgaagaacggacagagtatcttaggtctgcctgagacaggtatctccagtgcactggctgtacagttagctacatactgcggctttatgacagatgtctacggactgtcctgtacaagctgttctatggatgagcaggctggctatgaaaagatgatcaatgcattccttccggcaattgcaggagctactttggttaccggcttcggaagcacagccagtgttatgtgctgttccttaagtcagttagtgcttgacaatgaaattcttgctatgatccgcaaggcaaaacgcggctttgaatttgatgaagacattctgggcttcgaggctcttgactatgtggtaaacgatcacgaaaccttcttagagcaggagcacaccattgaatatctccagaaaaacgagatcttcgtaccatccatcggtttcgacagtgtatgggctgactggattaagtgcggagagaccccactgaatgagagagctgctgatcgtgcattagatttaattgagaaagatgaattagttcctcaggatgcagccattacagcagaagttgaaaagattctggcagccgccgaaaaagaacttctgtaagatacacccctccagaaaaaagcaaagggatatattcctttgcttttttccctttttctgataaaataagaacatcgaatataaaagaggtgcagcctatgaaaaactatacgattacttttttgcaggagcagctttctatagcagttcctgaaggcacgactcttctggatgcggagatccaggcgggcctgcagccggatgcaccctgtgggggacagggttcctgcggcaaatgcattgtaaggattatctccggtcctgttactgggattttgaaagcctgcagtgtacatatacagggagacatgaccgtggacacttccctgaaagctaccggccacagtctgctcaccaaggggagctcccgtgaaattattgttgcccccatgatacagtctgtggatgttgaggtggagaagtgccggatcggtgaaagtgattctgactgggaccggctgaaaacagctgtagccgccaagtcctctgtacctcctgcttccgtccctcccaatgtgtcagttgcaggcactctctatgagatattaaagagctcggattataagccaaacgttatcttatgtcacaacgaaatcctggatgttagaagagagcacacgccttactatcttgccgcttttgatatcgggacaacttcaattgtaggttatctcatggacgggtgcagcggtgaagagatagcagtatccagcatgctgaacccacagtcacagtatggggctgatgtcataatgcgttccaattatgccctggacggccatctggaacagctgagcaacgccgtccgccaggcaatgaatcaaattctgcaggcacttgcagaacaggccgccatagaaatccgggatatttatcaggtttcctttgtgggcaacacctgtatgcaccacctgtttctggggatttcaccgggagcgcttgtgcactctccctataatccctccctgagcgagcctctgatcctgcccgccaaggaatacggtatccgcattcatcccgaaggcagactgatggtgctgccaaatattgcgggatttgtgggggcagataccgtaggctgtctgctggctactaatttttccaaaagggataacatgacgcttatgatagacatagggaccaatggagagctggtaatggggaataaagaacggatgattacctgttccacagctgccggcccggcttttgagggcgctaaaatcacttgcgggatgcggggtgccaacggggccattgatcatgttacctttcagggggagcgtcttgtgtattccacaatcggtgacgaaaaaccagccggtatctgcggttctggtctgatggataccgtcagccttcttcttcagcacggatttctggaagaatccggacgcctttacagcccggaagaattagagcaccccatagcaaaggccaacgcccacagactcgtcaccattgacaatatctcagcctttatgctggcctttccggaggaaaccgaacggcaggaaccagttttcctgtcacagaaggatatccgtgaggtgcagcttgcaaagggtgctattgctgcgggtattcagctcctgtgccggaatctggacattgctgtggaagatatccgggaagtattgattgccggtgccttcggtaattatatgtcaccggaaagcgcctgcaatataggcttaatccctccagtactccgggagcgcatcacacctgtggggaatgctgccggggaaggttcaaaaatagccttaatgaattacactgaattccagcatacccggcatctggcatcgggaattgagtttttagagcttgccgcagagtcggagtttcaggatacttttgtagatgaactggaatttccacttccggaagaaatgagggaatgcgaatgattgactttgagactttagatgcaagaggtaaaaatgccgggtttacccatacaggtcccctggattgccataccatccgtcttctccctgaggtaagggagatgtgtgccgctgacaagtgtcaccagtataataaaaactggacctgtcccccgggctgcgggtcattggaagaatgtgaagggaaagtacgcaggtatcagaaagggctcattgtacagacagtgggggagctggaagacaatatggacggagaaggcatgatggaaacggaagccagacacaaggaagccttcctccgccttatggaagatctgaaaaaagactacccggatcttctggctatcggtgccggctgctgcacacgctgcaagacctgtacctacccggatgcaccctgccgttttcccgataaaaaggtatcctctatggaagcttacggtatgctggtcagtcaaatctgcaaggataattctcttccttattattatggtgactgtaccatagcatacaccagttgtttccttttagaatagccaaggttacagagatgattgcaaaggagattttcatggtcttattaggcgaaattcgttcctccattgaagaaggatatccgaagcagacagaaaaattagttcagcaggcactctcggagaacatctcaccccagcagatactggaagaggcgatgatccctgccatgcgcaatgcaggacagctctataaaggcaacgatatttatatagcccgtattctggccgcagcccgctctatgcgctgcggtctggatgtccttgagccttatctgggcacctgtgatatgcatcccatcggcaaagtaatattgggcactgtagagggagatctccatgatgtgggcaagaatctggtaggaatcatgttccgttgtgcaggctttgaagtgattgatctcggggtggatgtctctgaaaaacgcttcctaaaggcagtgaaagaacaccctgacgtctcagttgtctgtatctcttcccttctcaccacctccatgcccgagatgaagcatgtggtgaaatgtctgaaacagtccgataaagaaaaccgtctgaaaattatggtgggcgggggacccattacccaggcatttgcggacgagatcggtgcagatgtttataccgaaacagctgtagatgctgcagagacagcaaaaacattctttatttgatccatttattgagattccccacactgtacagggaggttacttatgaaactcagtcccgctctgctgatcagcgacttaaaaacaaaatattcattaacagcgccctcccctctctctgagcggccgcatctggggcgccccctgttttacagggaggataccggacttgtaaataatcatatatatgtactttcttccttttcggaataccaaaagcttagaagaggggcttcctcctgtttttttatctgccctctgaccgtcatggagacggagatggaaactgtggaggaggcagtatcttcctccgtgaatctatgtgtgatagatacccccgattcctcagcctctgtctttaattatctccaggaaatatttgacaaatatgatctgtgggaggagactctcatgcatatcagcttaagcggaggctccattcagagtctcctggatgccagttactctgttctcggttctcctcttcggctgatgggtatggatttttctatcatcgcctcctctccaggcgctgaagataatgccggaggacttcccacctatgaacagccggagtatattgagtatgttacagcactgaagcaggataccttgtacaatgcggtacgggaaaaggatggagcttttatctaccccggacacatcaccgggcaccgaacgctgaatgtcaacatcaagcgcttcagcaaaaccacgcaccgactggttatgacagagatggatgtcccctttaccagtagtgcaggcgctctgctggaatttctggcaacctttatagagcatgcactgatgcgcaatgcggcccaccgctctcccaatgataaaaccatgcattccatatttctcagcattttatcagaccggactgcggactatctggttatcagcagacagttaacctctctgggctggcttacctctcacgaatatctctgtattgtattacagaccacgtatctggatcagcaaaaccttaccattaacgccatctgcaactatctggaaaacctttttccctattcctgcgcgtttcccttcgaggaagatgtggttgtatattttaatcttacgaagtctgaatgcgatgttgatgatatctctgacaagattatctactttatcagggacagcttcttaaaggccggatacagccgttctatgacaggtcatttaaatttgaggcgccagtatattcaatcacgttccgcgctggaggtaggcaatcagatccatccctatctgtggattcatcattttaataagattgcactgccctatatttaccagcaggcaacaaaaaagcttcccggcagtatgatctgccacgagaagcttttggtactgaagaaatcagatgaagagcagaataccgaatatgtgaaaacgctcagcgtctatctggatcatcacctgaacgcggttcagtccgccaaaactttatttattcacagaagtacgtttttataccgtctggaaaagatcaaagatgttctggaatccgatttagaggatccggaagagcttctctacctgatgctctccctccgtctgatggatcaggacgcagaacagaatgcctctaatgagcaatcataaaatacccaaggactacgatacccagaacgatcctgtaccagccaaacgccttgaaatcatgctttttgatatatcccattaaaaatttgatagaaagtatagagacaataaaagccgttatcattcccacagccaggatcaatatctcagcgcccgtaaacgccaggccgaatttgaccagtttaagaagactggctccgaacatcacaggaattgccaaaaagaaggtgtactctgcagctattgtccgggaggttcccaggaggatccctccgattatggtggcccctgagcgggaagtacccggaatcagggacaggacctgaaacacaccaataaacagggccgttttccagtctatctcttccagggtatttaccctgggagttctttttttattgtagttctctattaaaataaagaatacgccatagattatcagcatcagagagactacaaaataattgctgaatttctcctccagaatatcgttaaacggaagccctataataatagccggaagacaggataccataattttcagccacaaaataattttatccatcttcacatatcgcttcaccaaatccttttcccgactctgattctgaaacggccagattttctcccaaaacagaacaactacagccagaatcgctcccagctgaatcactaccataaacatatcccagaattccctggaaacatttaatttgataaattcatccactaatatcagatggccggtgctgcttatgggaagccactctgtaatcccctctacaatacccagaaaaataactttcaacaattcaataaaatccattataacctcctcttgcctgctcaatttcggttcacataccgcccctcagaatgccgtatgacttactttcaattgttacaaaagcatggcacagccgtatttttattctgctgtgccatgcttttgtaccttccctgttatcagcggcccgcgatcctggcaatgtcaataagtgtcagccgattcaaatctgtattctccagactggtaaccagagcagtcgccgtatcaagagaagtgagtacatttacccctgtctcaatggcatttctccgaataataaacccatccttcgctttctctactccctgagacggcgtatcaatgaccaggtcaattttatggcctaaaatcaaatccatcaggttcggagaggactgctctattttatttgtgcggatcgcatttactccgtgctccttcaggactctcgctgtacttctggtcgcataaatcttgtatcccagagcttcaaagcgtctggctatctccactgcatcctgcttatcctcatccttcaccgtcataatcatgtttttatgtctgggcaggtttactcctgctcccaggaatgccttatacagggcctcgttaaatgttttcgctattcccaggcactcacctgtagacttcatctccggaccaaggcttatatcagctccccgtatcttttcaaaagaaaatacaggcatctttatggcaatataatcagcttcgggctgcagtccgggcttatatcccagctccttaatcttatggccaagaatcaccttggtagccaggggtacgataggtattcctgtcaccttgctgatataaggcacggttcggctggaacggggatttacttcaatgacatacacatcttccttacacacgataaactgaatattgatcatgccaattacatgaagagattttgccagtttcctggtatagtcctcaatggttgctttcgcagtgtcgctgatagtctgggcaggatacaccgatatgctgtcaccggaatgaatgccggcccgctcgatgtgctccataatccccggaatcaggatatcctcaccgtcacagacagcatccacctcaatttcctttccctggagatacttatctaccagtatggggtgctcctgggctatacggttgataatgcctataaactcgtcaatatcctggtcactgatagcaatctgcattccctgaccgcccagaacataagaggggcgcacaagtactggatatcccagctcaccggcagctttttttgcctcctccgctgtaaataccgtatgtccctggggacggggaatccggcattgttccagaatttcatcaaaaagttctctgtcctcagccgcgtctacattctctgccgaggttcctaaaattttaacccccattcgaattaatgcttctgtaagtttaattgccgtctggcctccaaactgaaccacagctccgtcgggctgctctatgtcaacgatattctccacatcctcaggtgtgagcggctcaaaatacagcttgtcggcaatatcaaagtctgtacttacggtctcaggattattgttcacaataattgtctcatacccttcctgtgagaatgcccaggtgcagtgtacagagcaaaagtcaaactcaatcccctgcccgatgcggataggtccggatcccaggaccagtaccttttttctgtccctggtctgcaccgcctcattctcaccgccgtacacagaataatagtagggggtggcggcggcaaattctgctgcacaggtatccaccatcttataagccgccagtatcccctgttcttttctcttagccttcacttcttcggctgtcataccagtaaggcctgcaattacgtgatccggaaattccaggcgtttcgcctcgcggagcaactctgccgtaagctcattcgtctgcagctgctgttccatctccaccagcactgctatcttatcaataaaccatatgtcaatctttgtaatctcatgaatctcttcatagctgatctctctgcggatagcttctgcgatcacccagattcttctgtcatctaccacagccagctgttccagcaggtcttcccttgtcagttctgtgaaatcataagacataaggctgtccacatgctgttccagagaacggatggccttcataagagccccttcgaagttactgcagatgctcatcacctcaccggtagctttcatctgtgtagtgagtgtcctctttgcactgataaacttgtcaaaaggaagtctgggaatcttaactacacaataatccagcataggctcaaagctggcataagtctttcctgtaattgcattgggtatctcatccagggtgtatccaagtgctatcttggcagcaaccttagcaatgggatatcccgtcgccttagaagccagagctgaggatctggatacacggggatttacttcaatgacacagtattcaaagctctccgggtggagtgcatactgtacattacacccgccggtaatattcagctcactgatgatgttcaatgcagaggtacgaagcatttggtattctttgtcccccagtgtctgggagggagctactacgatgctgtctccggtgtgaaccccaacaggatcaatattctccatattacatactgtgatgcagtttccggcactgtcacgcattacttcatattcaatttctttccaaccggcgatgcaccgctctacaagcacctggccgacgcgggagagacgaagaccattttccagaatttctaccaattcttcttcattgcgggcaatcccgccgccgcttcctcccagggtataggccggacgaagcactacagggtagcctatggtattggtaaacgccacgccgtccgctacattttctaccacaagagaggccgccaccggctctccaatcttttccattgtacttttaaactcaaggcggtcttctgccttttttattgtttctgaggtagttcctatgagacgcacattatgctctgcaaaaaatccccgttcgtccagctccatagccagattaagtccggcctgcccgcccagggtgggaagcacactgtctggtttttctttcaaaatcagctgttctaccacttcaactgtaagcggctcaatataaacccggtctgcgatatctttatctgtcataatggttgccgggttcgagttaagcagcactacctcaattccctcttcttttaaagagcggcaggcctgggtaccggcataatcgaattcagccgcctggccgatgataattggcccggaaccgatcaccaatactttttttatctctggattctttggcattattcagtcacctccatcatcttcaggaatctgtcaaacaggtagctggaatcctgagggcccgggcaggcttccggatggaactgcacggtaaaaatattctttcctatatattttaacccctcatttgtcttatcattaacattttcaaatgcgggcactgccacattaggatccagggtggcggtgtctaccatatatccatggttctgtgaggagatataaactctgccattttccaggtcttttaccggatggttgccccctctgtggccatacttcatttttttggtatcagcaccagtagccagtgccatgagctgatgccccagacagatggcaaaaattggaatattgctttcgtacagctttttaatttcttctataatagaagcacactccttgggatctccaggtccgttggatagcataatgccgtccggctgttcccgcaaaatctcttctgcagatgtgagcgcaggatatatggtaacctgacagcctctctcgtgtaaagatctggcaatattattctttgccccaaagtccatgagggcaacctttgatccttttccctttaagactttctttgccttacaggttactctctcaaccactttccccgtagtatatgcctttagcttcggtattatctcatccagtgcaaagttctcattcgtagtaatcataccattcatagtacccttttctcttaaaatcttagtaagggctctggtatcaattccggcaattcccggtatgtcatattgtaccaggaaattctgtatggaatcttcacttctgaagttactggggattcgggataattctctgacaatgtagccatcgggccatggtcttaatgattcctgatctgcatggcagatgccgtaattaccgatgagcggataggtcatgcatacggcctgtcctgcgtaagatgggtctgttaaaacctcaagatatcctgtcatagatgtgttaaatacgatttcactgataatctcccgagacgacccgatactcgtcccggtgaacacagttccatcttccagtattagaaatgctttcattctttcacctgtagttcctttcctattcatgttaacgtccttcagatgacttcaccctacattttttcaaaaaaaaagagacgccataacagtaggggctttctctcagagattctttacctattatctatatgtgattctttctgcatatccctgggagttctcaaattgtaaaaagtgtaccacaatatatgatgtttttcaaccttttttctttcctcttatgcctaaattttattgttttaaaacaaaactttttgtattgtgtgagaaacttttttaatttttttctcaaaaactattgacttttatctcaaaaaaggttattatatgtcatgtgctgcggggcagtacataacagagaaatgcaggagtggcggaattggcagacgcgcaggcttcaggtgcctgtggtagcaatatcgtgtgggttcaagtcccatctcctgcatcttttttatttaaaaaacatgaaccttatctgaaaggttcatgtttttttcatggaagaatagttttcaggagacaatacagtgctttgccgctgtcagccacataacaggcagcctcctcttcctcgggcttcctgccgcttctattgagccagatagggatccaccccgccttcttggccccttccacatcgttcttataggaatcccctatgaaataaacagcttccccagacagccccatgcttttctctgccaactgaaataccgagacgtccggcttggcagctcctacgtcgccggatataaaaatattttcttttggtatccaggcatctgctcccagagttctgattttttcccactgatggtccgatgggccgttcgttataatccccatagcaattcccctgtctctgcaaagagaaagcacctctctcatcccttccgccaggtccagtttcttctggtgcttcgcatacgcctcctgaaaaaaaagagcctccgcttccccgatgctgatactaaagtctgcgaatgctttctggattctatagatatacatatccctcatggacataacccctgtacttgacagttcaaacacctcgtcgctgtgccggctgtttgattcgtataactgttcagcaggtacctgataccttcccccgaaaatctctttatacgctttcacaaaaggcacctttctttcgtacaatgtatcatcaacatcaaataatactgctgtcatataacctccgtttttcattcatcgttaagcatttcttatcttttagattcattacttctaaatataaataatagttttgtgtatgtgaagctcagagtaaaatagtcagcgagcggagcgtcgcagacggacgctcaagagaggaggtcttagggccgcgggtactgtgtggaagaaatcattccttttctgataaatctcccccccggaactatcccatacccaggtgagaggaatcccgcggcggtgggctggctggttcgggcgggaggaaggcctgggttccgcggacgattccgcaggagtgtttagagagtcttaggcaaaaccgggattcacgcaggagattttttcggcagtccgggccgaaaaaaagtgagcatgggcagagaatgcacataaagcattctttgcacatacgaacggtgctccggcggggattccggttttgtcttagactctcttcgcgacggaggtgtccccggaacccaggccttcctcccgcccgaaccagccagcccaccgccgcgggattcctctcaccgtcccctccccgcccatacaaaaagaaaacgctgccccccaaacgacaacgccgtctgcttcgcaacgctttccctctcacttgttaatcagcaaacaaatccgaaagtgcatcctggcaaataagttttatgccatttttgctgagcacctcaatcgccttctcattatccggcacacggaagatcatataggccaaatccacttttctcgtaataaaagcatatgtatactccagattcacaccgttctggcctaaaatgtccagtactttgactagacttcccggcctgtccggaatttctactgcgagaacttttgttatggaaaagacataaccctcatccttcagcacgcaggctgttttataggaatcgtccacaatgattctcagaatgccgaagtcttccgcatcagccaatgacatggcatgcatattaatctgattgtcgtccagaagcttggcgaattcttttaactggcccggcttattttccagaaaaacagatatctgctttacagtcatagtatccctcctctttaatataggttacgtttatcaattacacgtaccgcttttccctcgctgcgggcaatactctttggtgccacaagttttaccactgcataaataccgagcattgctttcagtgcatccctcagttctttttccttggccgatacataggacagggagtcggagaacatttccggtgtcatttccaccagcacctccagcttgtcgctgttattctctctgcttacgataatctggtaattagcgggatatcccttgttcaaaagaactgtctcaatctgtgacgggaaaacatttacccctttaacaataagcatatcatcgctgcgtcccattggttttgtcatacgcacatgcgtccttccacaggagcatttcttacgattcaggacacagatgtccctggtccggtagcgaagcaaagggaatgcctcctttgtaatgctagtgaataccaactctcccttttctccgtccggcagcacctctccggtattaggatcgataatctccgcaataaaatgatcttcgttaatatgcattccggcctgctcgctgcactcgaatgacacacccggtcctgatatctcagtaagaccataaatatcataagctttaatccccagtttgttctggatatcctgacgcatttcttcactccaggcctccgcgccaaagatacctgcttttaacttaatctgatcctgcaggcctctttcacagattgtctctcctaaataagccgcataggacggcgtacagcagagaattgtagaacccagatcacacataaactggatctgacgatctgtatttccggaagacatggggagtgtaagggcacccactttatgagacccgccgttaagccccgggccgccggtaaataagccatatccatagcttacatgaaccacatcgtctttcgttcccccggcggccacaatcgcccgggcgcagcactcatcccacagatcgatatcatgctgtgtataaaaagcaactactcttcttcctgttgttccgcttgtggattggatacgcacgcaatcttttagcggcattgccattaatccatatggatacgcttccctcaaatcgtccttagttagaaagggcaatttatggagatcctctctggacttaatatcctcaggctttaccccctttttgtccatcatactgcggtaatatggcacgttctgataaacgtgatgtaccgttttcacaagacgctcatcctgccatgctttgatctgatcctgagatgcgcattctatctctggttgataataattgggcatgtttcgtaattcctttctcttctgattttacgtatatttggtttgaactacataggaacaagccagaataaaacttatgtatattatagcagttatcaaaataaaggtaaataatcttttgtatcttttgacggttcctccatccacttcacaaactgtctctccagccagggatcaaactgtctgccggaccacctttctaattcagaaataatggctttatcgttttctgccgctttgccataataaccatacttcatcctgtcatatgcatccacaagcattagaagcctggattccagaggtatctcctgcccctgaatcccgtagggataaccgctcccatcccaattctcgtgatgaaacaaaagtacccgcgccatttcatgagtttccggcatagaccgaagaatacggtatcccgtttctgagtggcgccttatttcctttttctcctcctcatttagcagttccttcttatttaatatttcatccgatatggatgccattccaatgtcatgaacatatcccagctgtctcaggaagtgtatcttctcttgttcccagcccagatattggccaaatgcaccggccagacgcgataccctctgcgagtgccggtaaatcttactgtttctgtcaaataaagtctttagaatcagatcaatggtctcatacttttttcctgtactgtgcagaagcttcctgctgtacatcatatcttcagctgcagaaattatagtaaccagagactcctctggttccttttttacagcgtatccccaggaaaatgagaccggcaggccgcccagaatacaggatttaatttcctcctgcactttattcagataaatctgagcctcttccaaaagtgtctttctgaaaaaaatcactatttcatctccccccgtgcgtatgattaaataatttggagatgcaaattttttaagtaccctggaaacttttataatagcccgatccccaaaagaatgacccagtgaatcatttatcatcttcaaaccatcgatgtcaatcatagccactgtcaggggaagctcactgtccccattctgattctgtacaaaatcatcgtaaaaatgcctgttgtacatcccggtgagagcatctctcctgctcaattccatgatctccatctgttttcgctttagaccggaggtgtctgtaagcgcactccatataacagccttgccgccacgttttttccagttatcctctgccctctcctggtattttctgcttgtcacagttactgcaatagttctgcactccccctgaagttctatgtccacagcatccgtctccccatagcaaagaatcctgtgtatcatctcccacatcacatcttcatactccggaaggatataatcgaaaaaatttttgctctcactctctgtactgttttctccagcccctaccattctgccaaaagcccggttggctgttataattctgccatcttcttcatagattacataccctataggtgctccgtcaaatatctgcttatagccgccttctttcacggcccactctgaagctttaagatcatccttctgttccacaatatacctctccttaatgaacatgatttaaccataatggtatctattatagaagaagtacccggtggattcaaacaaatcccgtcgaaggctgaagggagtaatttgtcgcaaatcagcaaaatgagggtatctgtacactctcatgggagaaagtgtccataggaagggttaagaatatgttaatttccccaatgcttctcctcccggccactgtcgtgttttattccaaataaaattcttggcgtaaaaccccaacctgtctcatacatatgttaacagaaagaatcaggaggtgttgtatggaacaaaaaggctttgtatttgccgccgaggctccgtatccccaggtaaaggtaaaatgtatgaatcagatgtacgcaagggagatggcaagtaatataggggcctgcaactcagaaatgtcagcagtcagcctctatttttacaacagtattattgcaggagagacctacaaggagatatctgattgtttccacaagatcatgatcgttgagatgcaccatctggatatttttggaaggctggcgtatcttcttggtgccgatccccgcctgtgggcgtacacaagaagacgtcccatatactggtcccccggatgcaatcaataccccagacagctcaaggatctgcttcagaacgctcttcggggtgaggaagaggctatccgcaaatataaaaggcaggcagaaagcatccgggatccctatgttgtggcaaatttacaaagaatcatagaagatgagaacatacatgtagaaatatttcagacactctgcagacagtatttatagacaaccagctaaaaaatccggcagcgccattcctctcagggagcggtgctgccggtctgctagttctgctggggcctggccatagggcccacagtttctctctgctttctggacaggcggtaaatgcagacagcacaaagaaaacccacggccgcgcttgccatagcacaggcaaagataattttatacccggctgcaccgggataccgatcaagccagtgccctattaccgtatacataaacgcatccggaagaaatcccagagcagatgcaaatcctacaacagcaccatttacaccggccggcacgcccgcttccgtcaatgtggcaaaataaactccacggttcacgtaaatagccaaaccaaatgtaaacatcagaaccgtagccaaaagcagaaactgactgccccccggtataaaaagcataattccaaatcccactgcaataatgataaaagcaaagaccatcgtcagtgaggaagaatgaattttgtctgcaataaatcctcccgaagttcccccggctatctgaagcccccaggtcctaagcgttccaatggcggctgcaaaggttacagaagcccccattactccggtaaggtagggcgtaaagtaccccaggcagatgaaacacatcatagtagcaaatatagtaattgtaatgagccacgcctgaggcattctcagagccgtaataaaattgcggacaggtgaaatctttccttccgcagacccctgtacctctgtcttggctgcaggaatgacaaaatatgtaatgatgcctaagacaatatttacgactgcatagataagaataactgtgcgcagtccacctgcgatggaaacagcccggttaaatatggctacaattccaaggccaatcaaagtagatataaacccccgggtgccctccagaagcccaaacagccttccctgttcattttcagttccaaggttcctcacataattgatcagtgccggccagaagataagagaactggtaaaagcccagaaaaagctaatgccaaaggcaatgggataggccggaaaagcggcaaaccagaagcccgcaagtccagttaatatctgtccggaagataataatattttactggaaatcctgtcagccacagctccgcctatgatatagcagatcacggaaccaatcccataggcactcatcaaatttccaagctgggcattagaatatccaaaggcctccagcattgcatcataataagagtagcgcagataggggagctgatagatcagccccacagccgcggacagcagaatcagaataaaccatttgtttttaacacctttccttgtgttcataaattgccccctttgcataaataacttctatcttcagcgtttaagatatgttatttatgtttatgagcaaattatgtgccagttcatatcagcaaaactctccggaagtaatcttatattttttaagcttcactgtcagtgactgtctagatatgccgagaagttttccgcaatgtgtcagattccctctggttttctccatagccgactctataatcgtcctttcataattatcgaccagcaggggcagattcttatattctgataactcccagctgtctgcactctgtttaaaggccatgtcatatgcggtctttacgcttttattcttaatcaccgactttttcagatactccaaaaaataattagggatatgttcgaaccctatatatgaatcattatcaccaagcatattaaacgcactttccaggatgtttgagagctcccgtacatttcctggccagtcataggttagaaacattgattttaaagaagggatcaggtcaatcaccagagcattctgttctgcattatatttatcaatcaatgactgcattagaataaataaatcattgcctctgtccctcaaaggcgggataataataaggcctgtggataaacggtaatacagatccgtcctcataattttatcatttatgagcttttcgggaagtacattggttgcactgattatacggcagcttattttcctgaatttattgtcccctactctctgaacctccttttcctgaatggcacgaagaattttagcctgtagcagcaaaggcatggaattgatttcgtccagaaatatggaaccatcttttgctttttcgaataaccccacactgtctactgccccggtaaatgccccttttaccgtaccgaacaaagtgctctccagcagagtctccggaatagctgcacagttcaccgggacaaaaggacctgcataatagttgctggcattatgtatactctgtgcaaacagttcctttccagtgcctgtttccccgcagagcataaccggcatatcttttcctgcaaacctttttgcaacctgtatggtgttctgcaatacactgctttttcccataatatcatcaaacatatattctgttccatttttcagttgtttgtgtctgagtttaatggtgctcttcttcataaatgatatattttggatcagccgccttttcagagaactcacaggatcgcaaaagatcactgcacctaccgtttctccttcttttactatcggataggcactggttaaagcattgtttcgtttcccgttgcaataccattccagatttatattttctattgatttacccgtatgcagggcagtgatccccggggatatggtttcttcccccagataaatactctgatagatttgaaacgcctgtttgccaattatctcatcccgcctgagtgcgtccagttcttctgcggccttattaataaacctaaaggtgccatcctgattcaaaatataaactgccgtgggcagcatatccaggatttcccaaaaaattgattccattcccaatacctcctcatgccataagttaatagagctcttacactaataatgcaataattattgcagttagtcaataaaagcaataattattgccgcaattaatattgcactaactccaactcctctctcgtgtactgcctctcataatagacagacaatcgtttttcacactcgccttattttggcacagtttttgcttgtataaccatatagcgtttaagatataaaaaaactaggagattgtcgaaaggagtacggttatggcaattgaaggattaaaatcatactaccagataaacggagggctgtttcatgcagtctcggaggttgaatgtgaacgtattatcaatgccgccctcacgattatggaaacaacaggtctggaggtgcagcatgagagggcggttgcacttctcgataaagcgggctgtagaaaagaggggaaaactgtgatattcccccggaacctggtcatccgctgtatcaactcggcggccccggaattagtcctctacgatcgcttcgggaatgttgcccttcgggcgggcggttctaatacttattacgggctgggacctacgaatccattttttaatgactttgaaaccggccgaagaagggaagcggtacgcagagacgtgacatacagcgccagggtcgcagatgcctgtcccaatatcgactttgtgatgggattagcacagatatcagactgcccagtacccatctctgatgtggttgaaatgtatgaaatgctgacaaataccgtaaagccagtcatcggctggggcgtaggcgtagaaggtttaagagagcaggtagaaatgtgctctgccatcgcaggcagccgtaaggatttgattgataagccttttgccgccctgtttcccggctgtccggttaccccattaatcattccccatttaatttatgaaaaactggagtactgcgtccagtcaggtcttcccgttatctggatgagcggagcgcagcttggttccgtagcaccggtcaccatggctggcgcactggcatcgggcctggcggagatgctggccggagttgtcctctctcagctaatccgtgagggatgttctatcgcctgtggaatggtagtgctgactgtagatatgtccaccacccattcagcttacggaagtccggaacattgcctgggggagagtattgtcgcggatctctttcactacctgaatcttccctccatgcagaccggaggtgttacggactctaaactcgtggatgagcaggcggcaattgaaacttctatgcagatcataatgaatagcctcagcggaggccatctggttcacgatgtaggttttctggacggggctatgtccggggcgctggaacagattgtaatgtcagatgaaatcataggattcgcgcgaaggattaccaaagggatgaaaattaacagagacacacttgccttggacgtaattcatgaagtgggacccggaggggaatttctgacccatgaacacacctttgaacatttccgggaggaattttggtttcctaccttaatagaccgtcagctttacagcagctggtccaaaacatcccttgatatgcgcagcagaatccataataaaacagctggcattctggcagagcacagagcgcctgcactgccggaagaagttatggagcaattaaactatatcctggaacaggcacagacccggatccaatagctttaaagtgatgagcaaacagtatcaataaatacgctcagccgaagcagccttctttccccttctcctgcaggagtataacttctgatttataagatttatatatttatatatattagaccctatcccagggaaaggctataataatagcaaaggaagaggaaagaaggaagaaaaatggttgaaaagattaaattggacggcagagattaccgcatggaaaaagactccatcggcgagatggatgttcccggggaggtatattacggcgtacagtcaatgcgggctgcagaaaatttccgcatcacaggtttgtccatgcatccggagattattgtcagcctagcttacataaaaaaggcagcagctattacaaactgcgaggtaggtaccctggacaggaaattaggagaggccatcgttcaggcctgtgacgaaattataggaggaaagctccatgaacaattcattgtagatccaattcagggcggtgcaggtacttctttaaatatgaatgccaatgaggtgatcgccaaccgcgccattgaacttttgggcggagaaaagggggactattccatcatccatcccaatgatcacgtaaactgcggacaatccaccaatgacgtcatccccacagccggaaaaatgacttctctgcgtctgctggaaaacgcacaaaaagaactccgtcgcctctatgatgttttggaagaaaaagcaaaagaatttgacggcattataaaaatgggaagaacacagctgcaggatgcagtccccgttcgcctgggtcaggaatttaaagcatatgccgaagctgtcaaaagggatgtataccgtatggatgtggcaaaggatgagatgcgcagcctcaatctggggggaacagccattggaaccggcgtaaatgcagatacacagtacgtcaaaaggattgtgcccaatctggataagattactgggatgggattcatccaggcctacgatatgctggatgccacttctaacctggattcctttgtggctgtgtctggggctgtaaaggcttgcgccgttacactctccaagatagcaaatgatctgagactgatgtcctccggacccagaactggtttcggtgagattaatcttcccgaaaaacagaatggatcttctattatgcccggaaaggtaaacccagtgataccggaagtagtaaatcaggtagcctttcatattatagggaatgatatgactattactatggcggctgaagccggacagctggagctgaatgcctttgagcctattattttttataatctgtttcaatccattgatactcttgcctatgcggtacagacctttgtggataactgtgtgaagggcatatctgcgaatgctgagaggtgccgtcagctggtggagggcagtgtgggggtagtcactgcactctgtccccacatcggttaccagaaggctgctaaaattgcaaaaaaggcactggcatcccgcaaatccgtccgtgatttgatattggaggaggggatcgtggaaaaagataagctggagtacattctggatcccctggccatgacagagcctggtataaaataagaaaaattgcgatagggaacgcagtttcctatgtaataaaaatagtcctgcaggcagagtgagagaccgctgccagcaggactgcatattttgcttcttttttactttttatggaaggtctgagacaccacagtcacaatgcatcccaggaaaataaagagatctgataggttgaaaacaatattctcaaattttttccatggacacttaaaacttacatagtccgtcacatagccctgacgctgtctgtcatgccagttggataatccaccccccagaataaagcttgcacctattttagctattgtataccccttctgaaaaaggagccacagataaccgattccggccagcaaaagtcctgtaagctgtatataagtaacctttttcctgtccttttttaacaaaccaaatgctatccccggattgtttgtcctgcggatgaggactctgcctcccaaacgttcttctgtgacattcagtaatttatccgcctctaccttacgctttataaaatagtctaagcagaaaattcctgctgcgatgattaaaaatcccatactccacctgccttgcctccggctctgtacctatccttccgtcgcctccagtcggacgggctcctgcccccgaagaagaatcctgggtcctccggtatgttctatatattcctttgttataattacttctccgatactgtcatcctttggaatctcatacataatatccagcatgtattcctccagaattgcccgaagtgctctagctcctgtgtgcttcttcagcgccatctccgctatggcctccagggcaccgtcttcgaactccagcttcacttcatccagagccagaagccttttatactgcttcaagatcgcattcttaggttcttttaatatctgaaccagcatttccttcgtcaggccagacagagtaaacaccactggaagccttcctaagaattccggaatcatgccgaatgtttttaaatcatccacagtaaccttctgaagaactgtttcgtcgtggtcatatttatccttcagatccgcgttaaatccaatggaagactgcttattcagccgttctttgattacattctccagctccggaaaagcgcccccacagataaacagaatatttttggtatccaccgttgtaagggggaccatagcattcttgctgtttgcacctaccgggacctccacttcgcttccctccagaagcttaagcattccctgctgcacagattctccgctgacgtccctctggttcgtgttctttttcttggcaagcttatcaatctcgtccacaaatataatcccatgctctgccttttccacatcattatccgctgccgccaggagcttagatactacactttcaatatcatctccaatgtatccggcttctgtcagggaggtagcatccgtgattgccagcggcacatccaacagcctggctaaagtcttcaccagatacgtcttgccgcttccggtggggccaatcatcagcatatttgatttttcaatttcaatatcatccaccttatcagcgtatactcttttatagtgattataaacagccactgacattacttttttagcatagtcctgccccaccacatattcgtctaggctggccttgatcttatggggagcaggtatgtcttttatactgagtgtctttgcagtctcctcttcctttggcttttcctttttctttttcagcttctgctttttggggatctgatcctgcagagtcgacaggtcaatcatactgatgttcggcatattaggaatattattcatcagatcgttgtaattaatattgctgctgctcattgtgtcaaaacttttctgcatacactctgtacagatgttaatattattgggaagacttatcatctttccagccttgctctcaggacggcggcacataaaacatattttttcatactcgtcgtcatcttttttatcatgatcatccacagtgactgcggtttcttctatatctgcctcatcaaataattctttatcttctgacatatagtgttctcctttacgatttctacttccatcattatatcctaatctaatacggtctacaagtgaactttttctaaagtcagaggacaatgaaaaaaggaactgcaggccgacaaatagcctgcggttcccttatcctattctgtagtcatttattactgtttctgctgtacattggagggcatatcactcttgtttcctaaggttacagaaagagtctgctctttgtattctccgttttccgcacgtgcaaccgtcacatccacagtctttcctgcctcataatattccagctgctcaatgagggcatctgctgaagagacactggttccttcgatctttgtgataatgtcgcctttcttaatccccgctgcctctgcaggacctcctgaggtaacttctgatacgaaggctccctgaggcatattatacatctctgtaatctgcgaatctacatttttacagctaattcccagataagactgcttattctcatctgtcactttatattttgtctcctgattcatcagttcatttaagataggttccgctgttgtaatggggattgcataccccatgccttctacttcactggatgcaaatttaacggagttaataccgataacctcacccttcatgttcaggagcgcaccgccgctgttgcctgggttgatagctgcgtctgtctgaatcaatctgcttgtaacattttcaacgcttacttcccggttcagagcactgacatatccggatgttacagactgtccgtatccgagggcattgccgatagcaactacctggtcacctacctcaagggcatcagagtctcctaatttagcaattttaatctgacttttaacgtcttccgggatatctgctaattttaccgcaattacagccagatcgttatctggatcggtaccttttatctgagcctccactgcattgggatcctgttcgctggaagaagctgactgactgtcagattctgcagcagccgcatcctcctgcccggtaaagcagactgtaagggttgtggctccgtctactacgtggttattggtagctatcagtagttctgagtcgttctgccctacaataattcctgacccactgctcttaccctcatattgctggctgccaaaaccaaaataattcggaacttcctggacactgatattcgtgatagctaccagggatggcattacatttttagcaacttcttttacggaagatcccgctgcggatgtgtctgccgcggaggtattaatcactgaactgtcagaggttccaaccggatctgtggttccaatcttgacctgttccttttcttttgtaccgttcagactgttgcctaccgcattgactgcctgaaaactaacaccggccacgagcccaaatactacggcaaagctaacgcatacggcaaatttctttccccatcctcctgaggaaacggcctttttccttttcttggggggctcctgaggggggacaggatttgaaatatggtaggagtgatactgggttttttgttctccggcatcctccttttctgaggcggaggtctgtcttgcttcttcctccccgctgctgtctctcatagtaaaattaatctgtgactccgaactgcggatagtatcttccttttgattctcttccccgggatgctctgtgccttccggtaaattgtttaatgaattatctctgttccactcttcattcataataatcatgctcccttctatcttcaacgtttttatttatctttctttatcttatggctttagtctaacaaccatttgtgtctaaattgtgatagaacgttgaagaaatcatgaaaggggaaatttctttattttctattcaacagtgaccgattttgccaggtttctgggcttatctacatcaaggcctttgcccaaagatacataatatgaaaaaagctgaagaggtataattgcaagagaattagcaaaatatttgtttgtcttgggaaggtagatcacatagtcagcacttttttcaatttcaatattaccggcgtttgtaacagccagtacaaaagcccctctggtttttacttcctgcacgttgcttaaggttttcttgtaaagctcttcctgggtaagaaccgcgctcaccagggtcccctcctcaatcagagagatggtgccatgctttaattctcctgccgcgtacgcctctgaatggatataggagatctccttcagctttaaagatccctccatagagatagcatagtctatgcccctgccgataaagaacacatgctctgtagccagatatctgttggcaaatctctgtattctctccttattcgccagcagaagctcaatctgtgcaggaagccgcttcagatcttctatcatctcctggaatacttcttccgagatctcgcctcttacctttgcaaacttcattgccagcagatagtgggcaatcagctgtgtgctgtatgcttttgttgtggcaaccgcaatctcagggcctgcccaggtatacatgacattatcagcttccctggcgatagaacttcccaccacatttacaatgcccagcactttaattccatgagattttgcctccctgagagcggccagagaatccgctgtctccccggactggctcacaatgacagcaagggtattcggttcgaagatagggttcctgtaccggaattccgatgccagatcgacctctacgggaatcctggccagcccttcaaacacatacttagctgttactcctgtgtgataagcggaaccgcaggctataatatatattttctttatcgcccggatctcttcgtctgtcatccccagttcttcaatgacaatatcaccgtccttcagacgcgggcttaaggtatctgtcactgctttcggctgctcatacatctccttaagcataaaaaattcatagccgcccttctcagcagcactaatatcccactcaatggtggtaggcgtcttttccagaacttcttcatccacattaaaaaactccacactgtcattggtcatgcggacaatttcttcgttctcaataaaatatacacttcttgtatattttaagacagcaggaacatcagaagcgataaaatttcccacctggcttttacctacaataagaggactgtcctttcgcaccgcgtatacctgcttaggatgctcctgaaacataatccccagtgcataagagccctccatccggtgcatgatctttacaattgcctccaggggatctcctttatagtagtagtccagcagatgggcaattacctctgtatcggtctctgacacaaattcatagcctttattttccagcttttttcttagcttcagataattttctataattccgttgtgtactacaacaatactgccgtctctgttaaagtgggggtgggcattaatatccgaaggtgatccgtgagtagcccaccgggtatgcccgatccctgccgtaccggggagtgtgcttcctccatgtgtcagttcatccagaacctttaacctgcccatggattttaccatctcaatatcggttccattgtagacagcaatccccgcggagtcatatcctctgtattccaactttgaaagtccatccagcagaatgggagcagcctgctgttcgccaatatatcctacaattccacacatacttttaacctccacctgtttgtacaatcgtacttgttttttgtccttttacaataacaggcttatcataccagattacattttaaatgtccagtattccttattcatggtgcatatacggatcagccatttgggcagcctgcggtaggccttccccagacggtatcccagaaacttaaatccactgtttaagaacagatagggaagcagccatggcttgtgtatggcacacagataggccgctgttctctttacaaggcgtatcccctcattctccgactttatatttgcgaaaacctccggatgagttacctgggaaacagcaagatcaaagtttctcttcagctgctggatattcccatagttgtgggaatgatagactctggccttggccgtatacgcaatggcataccctttatgaatcagatggcccgcataaatcatatcttcattaaatattgtgtgcaggggaaacccgcccagcttctcatacgcaagacggtcataagcagcacatacattagagcagaaaaatgtcttaatccccaattcaggcaaatcctctaagctttttatacggctggttttcggataattaaaggagcgggtataccgctctattatccggcagtcgctgttcggcagctgacgtgcataggcagcttttaccttttcattttcaaaggcttctgtcaggttctctaccaaatgtgtatctgcgggtatcgcatcctgggtcataaaaaggacgatgtcttcctggcagcaataccctacagcttcatccctggttcctccatgatcaaattcggacttttcgatatggtgtacttccatattaggaacctccctctcccaggattccttccaatattccttccctgtattcatgattacaattttttctatgggatagctttgtttcgccagcccatgaagcagctttacaaattcatccccggctttgtaaacaggaatcactacatccactgtttttctgcctttcttcctctcttccatccttttcttctccttcctgacgttataacagtgacccgggtgtttacccgggtcactgttataactgatcattttctattcttcactgctctcgtcactgctgctgtcaacggatttgtttttaccgattcctgtcagttcaaccgtatacttgcttctcttatgaatagtatcggaaggtgcataggcttcatctgcaaacaggaactgatgcagctgtactacattggtctccagattatccggtattacacaatcttgcttctttacctttttctccgtgtgttcaaacgggaagcctgccgtctctgtaatctggtaggacagcatggacatacccatgtcgataatttcatttttctgcaggttagtagaaatcatagggaacaccttatccataattttcattagagtaggtacccctgcagtttttgctttgtccacaatcttagaaataacctctctctgtcgctctgtcctggtaaaatcattgccggatgtataacggattcttgcataggcagttgcctggattcctgtcatattataagtccccggccccgggagcttctcatagtcttttccggtaatttccttcagctccacacagtaattattcagatggacatactcctgatcgtcaacttcaatttcaattccccctaacatatctatgacttcaattagggagtcaaaatttacagatacatattgggtgatatccagatccagattcgtattcatcatggaaatcgcctgctccggacctccgtaagcataggcagcattacattttgtataagtgtcgtctcccacattgaggtacgtatcccggtaaagagaaataagccgtacttctttggtgtcattattgatactggcgataatcatagtatcactgttccccttttccaggttcccgtcacgggagtcaagtccgaacagtgcaatattcatatagccggtaagcttctcattctgcacaacctcctcattaatctctaccttttccatatcaagggtcttagtatcgattttgtccagctgctgatttaatttggcatacacaaacagtgcactgatcagcaccagcagaataagcaattcaataccaaataatattcttcttctctttcgtcttttgtaggccttgctggccttattcagttttttcttagccattttcaatccccttaacctaataagcgtttttgtttacaaatcctttgaatatggttaaaaacaaaattttgatgtcaagaccaatggtccaattctcaatgtaatataaatcatattcaattcttttgcgaatggatgtgttccccctgtatccattcacctgtgcccatccggtaagcccgggccgcacctgatgtttaatcatatatcttgggatttcttccctgaacttctctacaaaaaacggacgttccggtctgggccccacaaggctcatatccccttttaaaatattaaacagctgcggcagctcatcaatgcttgttttccgcatcagcttgccgaagtttgtaactcttgggtcatccttaactgtccaggcctttttttcttctgcatccggctgcacatccatagagcggaatttatacatccagaagtttctgttgtgaaggccaaccctctcctgcttaaagatcaatggacccggagaggtgatttttatcataatcaccgtaaagagcataacaggtgaaaataatacaattgcaacaatggaacctgcaatgtccatcagacgctttaccatagcattaaaggtattggacaatggaacatagcgaatattaattaccggaagtcctaaaatatcttccgtatatggttttgtaggaataatattattataatctgggataaactttgtatgaacgccggacttttcgcagagagaaacaatctcctccagccggaagtattcacttagacccagggtaatcgcaatttcatccaaacggtttgccggaagaattaccagaagattctcaattctcccaatgactttaatccctttgtattcggtcccggcctctacactgtcatccagaataccccgaaccttatatccccactgaggattctgaatgatacggtcgatatactcttctgccgctctgctgtaccccaccagcaaaatgtgcttttgattcagcccccgccggcgcatgtcacggagaataaaccgtatagcattgcgcacaattgtctcagccacaatattgatgccgtaaaaaataaagagcatagtacgtgaaaaattaatttcccgcatcagataaagtccgacaatcagcagaaacaaaccaatggtattcgccttaacgatattgctgacttccagccgccttccctgcacccgtttgggggtatacaggttaaatgcataatataatatcaaatatcccggaacgatgacaaccaaagctgccatgtaacgttcaaacgataatgtctttaccgaattctgaaaaaagggactttcaaacttgataaaccatgccagccagtaagacacagcaattacaaaagcatcaatcactacatgcaagcggttaaaatgcttttgattgtctttaatcaatggttaccaccttctatttcatcttaatcattaatactatacaataaaaccatacaaagggcaactaaatattttcttaagtctttccttattcaacattgttcgtcaaaaaccacttcccggtgggctgggaaaaataaacaataattgtctcgtcagtctcccggatactattttccataggccattccctcattccctccatctgatccagagagattttgatctgttctggcgtaggtttcataatccggtaaccctcggtagccaaaaaatcagccatcctggcaatattgccgtcatcccatgcaaagacagagcctccgatagtatcagatgtttctattggaacagaatcataatcttccattcccacaaaaaccaccggtttcttatgataatccatgccccccttttttatatcgtacatcaactggttggcaacagtccgatcatgctcatatccgatactcccatagtaaaacaaaagattcatgtttcgggcatttaaaaacagcagataggaaagaacaacaaccgctgtttttttggctgcgctgcgctttatggcagagagaatcagccagatttctatccctcctgccaaaggaagtgcaagaaggtgtcttccgtgggttttataagtccccagtaccaggtacaggatgaacggagctgccgtaagagctgccgtaaaaaacagaatccctgcttttcttcttccccctttttccgcaaagaatctccagacggaaaagagtacaaaggctgctgtcaccgcacagagaaccactccaccgtatatttttacttctcccactggaatgccgaaggaaacacgcgctatattagcaaatgccataaacagggccctcagaggaccgccctcatccagccatcccacataattttcctccaggtaatctgcggttccggtcaggaagacaacacccatattaatcaggtaatatatgataatgcttccaatgcacagagaggcacataccccaatctctctgccaagccgctcccgcccatccataaagtttagaaggcagtagcccacaacggctgtaacatacacacagataagagcctgataaaccccaaacgcaaagatcaagagaagcaaaatgacgggaatttccttctttccgctgccctttagcaggcaaacagaccgccagaaagcaagtgcggtaaaaaccatagccacacaaacctgcagattaaacatggaaaatgaaagaatctctcctaccacgaagggcagggaagaatagtacgaacagaaaaagaaaagaggcagtctcttatcccctgaatcctttcccagaagactgtaggcgtagataatgcccgaaagattccagagaacaatcgacagaaagtcccacaaaaacggtgcataattaccattctgtgtaaacagccagttgaaaatttgggtgctgaacctcccctgaaggagccagagaagagaagacccgtccgccagaatccacgtttcttcatcaatggttattgtatgatgtgtcagcataaaaccaaaacaaaccagagagaaaagaaatgctcctgcaaatacttttctgtttttattcatatattccagcatatcgtcacgttcctttctccttgtcctgtcagcgcatcagtcttcttactatattaagatacagttcccactggattctcagataatttatcaaatgttttccggaaaattttacctttttttcctttgcgctgattctaaaaccattgacaatcccggctgcatattctcttgcaaaacctttctccgcaaaaaatatctctttcgccagaaatccggccagaagcagcggaagattccatagaatttgaaggagaggcatattcttataaatcaggtagatattatttctggaggaatagcgtaccttaaacaaattatatctggagccgctggttccgcttcccacatgatgtacaacagcatccggagtaaagatattctcatatccatagattctggcccgatacccgatatctatatcttcaagatacgcaaagtgttcctcgtcaaaatatccgatttctttcataatacttttccggtagatagaagctccgccgcaggcggcaaatatcttttcctcacgctgatacatttcctgaagcttccctttccccctggcaaatgcccaccccagagcacagtagtaattccccgcatcatctatccttgagggatcgtgcatctgcaccatcttaccctgacaggaaaatctttttggacttttacggatgctgttcagtaaattccccacaaaatccttttccgcttttgtatcgttgttcagcagaagcacatatggggcgctggatgcatatatcccctcatttacagccctgcagaacccaaaattctcagaaagcgcgatcagctttacctccggatattcctgctggacaagctcacggctcccatcagaagatccattgtcgacaacgattacctcaaagttggtaaagcgctgagccttcagcgcctccagacagtctctcatatatgcaattccattaaaattaggtatcacgacggatacttccttcataatactacctcttctatctcatctgatgcttcagacgttctattggcttcaaagaataattccatttcgtcagagatagatttttattgtagcagggatctccctcttttaatatctcttcccaatgacagcggatatattctatttctctttgaaatcttcgtactttttctttgttgtcttcaatccccctgctttttgattcataatgatacagttccgcataaggattataaacaatcaaatattctgcctgtcttactttcaggcagagatctatatcgttaaaagcaaccttcagttcttcggaaaagccgcccacctgagcaaacacgtgtttcttcatcatcatgcaggctgccgtcaccgcactcatatcctgctgaacggaggctttgtggagatatccggtcctgcttctgggcatgtttacaaacatatggccggcaataccgcccatcccaatgacacagcccgcatgctgaatggtgtcatccggataatacagcttcgcccccacagcacccacttcctttctctggcagtggcccagcaattcttccatccacctgggattaatcactgtaatatcattattcagaaacagcagatattccccattcgcataggaaaccgcataattattaattgcagaataattaaattcaccctcccagacaatgacacgtatcttctcattcgttttcagttcctcataatactgaaatatctccggcgaagtactgttattctctattatcaagatctcgtaattggagtaagatgttagttccattactgaatcgagacatttctttaatgattctttctcatctttattggggataatcacagacaccaaaggctctccgtcaaccggatactctacccggtaaaaccccaggtccttggtatggcttacccttcccttcactcccatccggtccaggtgggcttcaattgccctttttcctgcatcaaaagcatacattttactggcaggattatctgccgttgatgctttgtgtgttctccagtgatagagtatctccggtacatgtgccactttccgggccttctccacacagcggaatatgaagtcatagtcctgagccccatcgaactctctgcggaatccccctgcctgttccaccagtttttttctcaccacaaaaaaatgacagatataattattggagcgcagcaggtcaaggttaaaatcaggtttaaaatggggctggaaatgctcgtccagctctgcagtgactttatcctcgtctgtatagacagcatctgtcatttcatctcgttccagagcggcagcaatctcatatagggcattgggcgccagaaggtcatcgtgatccagcaaccccacaaaatcaccggaagccatagcaaaagccgcgttcgtattttctgcaattcccaggttcttctccagtttctgaaaatgaatcctggaatctttatctgcatattcctccagaatctcttccatacctttatcctccgggctgccgtcagctatacacagctcccaattatcataggtctgatccaacagagaatccagcatctggcgcagaaaaagctccggcgtacggtacgccggcactaccacactaattttatatttcttattccaatgtctactcttttgcagctccagttcctcttttcctggtatgtactgttcgtaccagggcccgtaaggtatttcctcaggttcaaaccgctcgctgagccgaacccagaattcctttaatccgtaatgcttcagatatctcagccccttttggatagtataaggagagagctttttcaatactctgctccactctattcctcccaaaggcatattattattttcactcataatgtttttccttatatatcgcctgccaggagcaggcatttgtgtacttgatacagtattctagcattatccagaggcttttgcaagattccatgcataatctcaggagtaaaagactacaattcccaccaaaatcaaaagattccccaatagttttctcttcgtgatcttctcctgaaagaacacccagctgagtaccattacaaatataaatcccaaagactcaaccacaggcccattcttaaagtctacttttttgtacgcagcaatggtaagtaaagtagatagaatcatcagtgcatacccggcaattacatggatattaagatactctcgtataatcgaagggtagaccttcccggcacttttcttcagcagcacttgagaaaaggcggccactaccaccgctgccaccagaaataaataataattattcactgtcatctgtattcaccaccattatccctgcaaatataatcccaacgcccagtaaattgcgaagagttacggtttccttaaaaaataaaactgcccacagcatggaccagaatattgcaaacgctctgttggcataggccacagatagttccacacgctttatcacctgctgccaaacgacagcatatattcccagaacgcccatctggatcccataacacaggataaatccccaggacaaaaagggatagcctgaggcaaactttgcagccacggtctcaaatgtataaatgataaccgccagctgcagtactataatctgtatgggtgatatttttttcactgttgttctccttttagattacgtaaaatgtacaaacccgtatttagggaatataacaccaaagaagctatacaaagctacagctgcaacaaacacaacaaggagtccatagacagctttttgctttttcccatcttttatcattatttgtgccaaggtcttaattccatatactacataaaacataaatggaatcagcattggcagactataccttccctggggctggaaatctacaaagtaagaatgataaaggtttagaaaattggtgatgcctatggccgccagcatcccaatgtggaaaaagccctccatgacccattctctgttttttctgattgtaaaaagccttttcagacgaatcagacatcccaaagctcctccggtaaatataacaagataaacagcatatataccctggggcagatagacatccatatatccaaacacccctacaaaactctgaaacaccttgtgcagccactgctgaccaaagagcattccccacagccctataccggtatgatgcgggttaggattcaggctcggcttgtactggggaatggcgtacaaatcaccatagtagttatttgtcttcaggcccagaaaatccccgtcataaattatataattgcggataaaccaccatccggtcagcagaaacacgatccccagaataaacaggcccttcctcaaaaaaggactccactgccactttttctcctgacatagtaacatagaacaggcaaaaataaaagcactgcttagaagataaccataggcattgtaataagaaagtatacaaaatgacatacccacagcaaggccagcacagtatttataatcccatttggtctcaattccccttatccacatgtatacgataaaggctgtggagaagatagccatagcatcattattaacatatgcccccacaaatacagcctccggcagaagcatgcagagtgcaatataaagccagcttcctgattccggaaataatttctttccgatttttacggcaaaaactgccgttcctgtagtaaacagtacacttggtatcctggccgccataaccagagcaaaatcactggcagaaaaaaagctcacaatcttcataaatcccgcagaaaaaatatacgataagataggaaaaaagccataggaaactccccagtaggggtcccggatcctgggatcccctccgtgaggcagagctccatatttataaataaaatgcggaatctcatatcgcatatactcatccggtgcattattgtacggtataataaatgcccacatgagcacaaacacaaatacaaaagcaataaaaaacctgtttaagtttctcccctcatttttcaacagatactctttcataaattatactccttattttaattttctccctaaatacccgctccttatcatatcatactgtgtctaaaatttaattaaatctttcttaaaaatctttaagcttcctctcttgcccctttctttccattttttcctatgctataataacccctgcaaggattagagaaagaggaggcaattcccttgaaatatgataaaaaactttcatttgtaattccctgctactactcagagctgtctgtcggccatgtggtagaagggatttttcaggcattccccgcggatgactataattacgaaattatactggtaaatgacggttccaaagacaataccttttccgtcatccaggagcttgcccataaacatccccagataatcgctgcaaatctgtcccgaaattttggacaagatgccgcactgatggcgggctactccctgtgtaccggggactacatcatttccctggatgacgacggccagaatccccctatggaagctcacaagcttctggaaaagatccaggaaggatacgatgtggtttttggcaaataccatgtgaagaaacacagccgttttaaaaactggggcagccgtctgaacgatcgcatggccacctgcctgctgaacaaaccaaaagaactgactttatgcagttactttatcatgacccattttgtggtagaccagatactgaagtatgacagcggtttcccctatatctggggattaattctccgttccacagataaaatcgccaatgtctatattgaccataaggaacgggaattcggtaccacaacctttaccctcggaaaacttgtcatgctctggctgaatggatttacttccttttccattaagcctctgcgcctggccagcattgctggcggtgttttctcctgccttggattcctgggggcactctacattgtgattagccaattcttccatccagagccaattgtgggatgggcctccctgatgtgtgtactgctggtaatcggtggtctgcttatgattatgctggggctgctgggagaatatatcggacgtgtttttctcagcatcaacaaagcacctctcttcatcatacgggatctatacagaaatccggaagagaataaaaacgaaaattaaaatgaggctgccggtatttccggtgcctcatttttctttcgtaactgtaacctccgtcaacgctccagaataatatccagatagcgggacagcgcatcctgccatgccggcaggcgctgaaatccgtttgccgtaagcttttctttactcatcctgctgttatgaggacgctttgcctttgccggaaactgagaactgtctacaggattcaccttaactttaactcctgcctgacggaagatttcccttgcaaattcataccaggtacatagaccttcatttgtcgcatgataaaagccatagttatctgtctctatcatatctaccagcagtctcgacagatcatatgtgtacgtgggagatcctatctgatcatttaccacattcagctcatcatgtgattttgccagattcagcatcgtctttataaaattcttcccatttacgccgaacacccacgcaatacggacaataaaaaatttctccacattgttttctactgccagttccccttcatattttgtctgtccatagatattcagaggctgcctgggatcatccggttcccagggccgttccccttctccgtcaaacacatagtctgtgctgatgtataccatctttgcatccagttttttgcatacctttgcaatattttctgtcccgaaggcatttactttccggcaaagctcttcattgtcctcagccgcatcaactgccgtgtaggcggcacagtgtaccacagtatctgccccagactctgaaataactgtttccacagcctcaggatctgtgatatccatctcctctacgtctaccccgatgccctcatatcctctttttgccagctcattcataacatcagtacccaactggccctttgctcctgtcactaaaactttcatatttgctacccgcctttcttcttctcacactatcccaaagaaaaatcacatctctttttcgtcaggttaggattataacagggatcccctctcttaagctcactcttccatatttcacagaacttgtccacttcttttggattacaggatgtctcaaccacagctttctccttttgcttagacggagatcgttctgtacaagcctctgccataggcagatacacaatcagatatcccgcctgtttcaccttcaggcaaaaatccagattggccagacctctgtctgtaaagagatattcctgattctggtttactatatcgtatacctctttttttaccatcataaactctgaggaaaccgcactcacatcctgctgcattaccgctcttgcacagtatcccagttcctcctttggaagcccggaaaatgcatgggcacccagtcccttgactcccagcagaatccctgcggaatataccctttgatccggaaaaaatagttttccccccactgcaccaacctccggtctctggcagttagagagcatctcttccagccacccgtcattcagtacggtgatatcctcactgaaaaacaccagatactctcccctggcagcctcacccagggtcacgatctcataattggtgtatgacgtgcgactttgaattttttttctgcacgcctctgccttagtctcagaagtaaccggtgcaatgataatggaaaccagcggtgtgccggtcagcgcgtagcgggtacggtaaagcccccagtggcctgcgtgctccacctgtgcctctatgctgagacggttcaaatgggattccaccgcccttcttccggcctcgtaggcatacgccttactttccggattcccggcaacggaacctggatgcattctccagtagtataatattttaggtatgtgcacaatctctgctgctacctccgtgcacctcagaataaagtcgtaatcctgtgccccgtcatactcctttcgaaaaccgccagccgtctctgccgtctcttttctgaccgtaaacagatggcagatgtaattattcgttctcagataatccagattgaagtccggcttgaaatgcggctggtaatgagtcacaagctccatatccaccttatcctcatccgtatatacaatttctgctccgggattttccttataagcctttactatctcatagagtgcttccggcgccagcacatcgtcgtgatccagcaatgcaatgatatctccggaagccattgcaagggctgcattgctgtttccggagatccccaggttttcctccaaaagtctgtagcggattcttttctccccggcatatgcattctctaccagggcttccaattctgttttgtcctttccgctcccgtcagcaatgcatagctcccagttttcatagctctgggctataactgaatctgtcatttgacgaaagaaaagggccggtgtgcagtatgcaggcacaatgatgcttaccagaggagcatcttcccaatgttctttcctctgcagttccagttccctggaggacgccctgtgcatctggaaccacttttcataggcaatcctcctgcctgtgagaaattctgcagacttattcatcatttctctgacaccataagtttttccgtactccagaatgcgctgcagcttttccatatctatttcccgctttccatcagttttgcttcatcctcccggatccagtttttcagcatatcacggactttctctgcttccttcagccaggaggtatcctttacataggcaagcccctttttcctgtacttctccatctcatcctcgtgggtgagataatattccagggtatccgcaatttcattgggatcgtagtcaaccaaaacagcattttcctccgttaccatccaggagctgttggctccctttgagcatacggcaacagaattgcaggccataacttcaaggggaaccagagagagatttgtattggatattacaaggcataagtcactttgggcatagcactctgccaatccattcatatccagaatccccttattctgatgtttaaagggaatgttgtaattgctgatatcccaccccgcaaagatcacttctacctctggcattcgtctgcaaagctcgtccagtgccagtaggcccaattcaaagtcccggcggggcgtcacaggccgtgcatagaaaaacactctctgcacactgtctgtccgttctctgggataataaaacttcttttcataggaaaagtgaaagcttccggtctccatctgatattcctctctcagcttgtccctcagccagtcccctgccgtgattccccggaatcccatcttataagtattctccgcaaattcatattcggatccatgggcataaaaatatggttcaaagtcctggacaaaatagaatttagagattgtattattaaaattcctgacaaaataagcggtgctccatgatgtcgcaatggtcgcatgtgcatattccgccagagatacatcgtaataggtttctacccgctcatccagaatagggaaatactttcgcaggaattctttcagactctcattgtctttaaaattgggagatttgtgcagataaatcctgctgtgaaatcccatattttcaagattagaaacaaaccgaaatatagtagtatgtcccccggatccaacccccatctccgggatcacccagtttaaaaggtatgtttcctccatcttgtgtgactcgtacgcttcctttgaaaaggggatctccgtgcggtccataatataccggtagaattcaatggtctcaatcttaggaggttccatctcttcctcattaatcttgtcaatgatcccccggatccctttgcgttttaaaaagctgcaggctctttttgtaaatctgactactcttcccattttttacctctctttattctcatactcaaactcccttacgcatgtatctgtttatactgctgcgaaatcagccggtctatcctctgctgctttttcggcgaccagtctgcataacgccctgccagatatcctccaaaatatctgcagtgatttttcctaatggaataaatcagccattttactttctctttcctgggcagtgtaattgacttaagataatggtaatctccccgtatatgattccatgtatatcggggaaggtgataccacttctctaccagtttatatctgtgcagttcatacagccctttatactcatcataatatctggaaaaatacgtccctataggatagttatgggaatggtataccggtgcaaacggacaatacacctttttataacccaactcaatcattttaattgcccagagctgatcctcggcaaaattcacatcttcatagggatacttttcaaagatatctctcctgacacaggaattgttatctgaaaaaaacgctaatttgtgtcggtaggcctcctcctctttataccgttttggatcctccagaaagtatatggtattgtcaagcccgaatcccttaaaatgtccgtccagatctcttttttcaaaaatattacagtcctcgtacggatagtgaatcccaaagccccctacaatatccgaatccagcttcatagcgtcgataaaattctgaagccaggtttccgcagccgggagagcatcctgcgtaagaaaaataatataggttcccgttcccttgaaggcaccgtaatttcttgtttttccatgaccgaactcagagggaggaatctggtacagcttacagtcatatttccttatgatgtccagcgtgttatccttagagccggaatccacacatataacctcataggtatattgggttttttgtgaaaatactgccgccagtaccttgtccagcagttctcctccgtttttcgtggggattacaatagttacatccataatagcctccaattacttttctctcatatccttatattttctgtatgccttccagaccttggtattctccatctttttgattttatcctgcaaatgacggatatttagcaccagttccgacattctcttagcatcctccgcagttttgaagattatacggtatttcactcccacttcatcatagtcctcattctcaataatcataaaaggtttgtccaggaaatagatgcagttttctctgaccagggcaccgttatgctgttccagggaaattggagtccagtcctccccggtccgggcagccacctctgtgagttccaggatacagcttttctcctccgggtacaagaacagcctctgaatgcccgtattctgaagcggaatgttgagtgaaatctccttgtccttggtcctgtaattgaacagttccttcgcttccccgggcgtctccttctctgctgtcagacgtactctggtgaatacattctgagtatccagttcccgcagcatatagcactgacgatccattcgccgatacagttcccccaggactgtgtattcccctgtgatataacgctggagtgaaatctccatttccagatacagccttcgttcttcctctgaaatatgcacggtatcataaactttatctatcatctcccggggcagcttgctgatctccacactgtggaacagtgcacggaacaaaatgaaagagaaaggtacaggaaaatcaaaaacccattcatagtcaatcatgtaatattggtttctaaaaattaggttcgtgggaatgatatctacattagagacagcaccggctctcatcccctccggcagccgaacctctccaaatatagcatcaaaagaatctgtcctcacaaactctccggcatgcctgacaccagagacaattctttccagaagctttatctcctccagaagcccttcccaatcctgttgattgatacacttttccagacgttcctccatgctttctccctcaatgtacgagaattctgcagtgccttcctcaaccagactgcatggacagataataacttctttattatccttatattcttccaggaggatcctgcaggaagcctccagcttctgaatatgtcccacggcctttggagatgcagcctttttcagcagccttcttggattcccctccataacctgagtcataatctgatattcttctctgcgctctttggaaaatttagcaaatactactttacgcatcctgttccccccttttttgggcggtcaccaaaaaggaattggaaaattccggaaacagaccagcctttatgattgaatcaaacgctcttgtctcatcaaacagcacaatacgatccgtatcaaaatttctctggttattcaccagctctccatccttgggaagatacgaatctgagtagatggtggtaggaagtttgtagtcgggatacgggtaataaaattgaacctcatgaaatccattgccctctaagagttctgaaagctccttcttgctgaaggttttcactccgctagtgttgggatatccttccagcccctcgaagggccgtcccacgtgatcttccggacagcctgcaaaatacttcagcccaagcttattctcaattgctataatgactgtgccttctgccttcaggaggcctctaatcttcgtaaggaaatcgtcatagggactgcaggtgcccatgtagctttctgcatactcaaacacaccgataagggttacataatcaaatttctcctctgtatgtgcggagacctcattaaaattccccaccataatctccaggttccctgcattttggttccggtaagcgttgatcatacttcttctgttagacagatcattggcgactactttcttcactgctcttgtaagcgccccggtgatcgccccgcagcctgcgcccacttcaaataccgcagcctcaggttcaaaaggataccactcaataatattttgcctttgcttagacaaatggtacagaatcggccatgatttctccttcatgatgatctcaggaaattcttcttccctgtggctcttaacaatcttaagaagctgctcctccacctcaccgtcactatagaggtcttcccctccatagtaatccaggttcatctttacttttcctattttctcacccattttgtatccatcctgttttatttttcataggtaacgctggaattcatgtcatagtagccaatggtatttttggcagagaatacctccaaaaagcaggcatcatacaaacgattatacacaacaaggctgtccagctcatatcctgtgcacccgaaggagatcagatactgtcctccctgaaggtcaattctctgttcaaataccgctgtagccgtagttccttttttgcctgttgacaggttattatcctctaatgcagtatttgtcccggtaatctctgtccccttcctgtcctttatggtaatggcaaagataggattttgaacagtatcgtggaaaaacactttcattttaatcttgcatctgcttcctttgtctatggtggatgtgatcatccctttttcatcaacaatggcaaagtctacaatttctgcttttttctccccatagtctatcacctgaggattggtgaccagcttttccttccagatttcctcgggcttattctcagcggcgcttacttcctgtgaaggctccacaggcccgttctcatcgtactggttcgccaaaatttttttataaatatcgataacctccgatgatttgcccacagcaatctgtttgccgtggtgaatcagaagacttctgtcacagtatttcagaacactgtttagatcatgggacacaaacacaattgttttgcctttttctttaaactcattgaattttcggtaacatttcgcctggaagaagatatcccccacactcaacgcctcatccacaatcaaaatatctggctctacattaatagccacagcgaaggccagacgggcaaacataccgctggaataagttttcaccggctgctgaataaaatctccaatttctgcaaagtctatgatgtcgtctatcttcttatccatatccgcctctgagaagcccatcatcgttccgttcagatagatgttttcaattccggtgtattccatgttgaatccggctcccagctccagcaaggcactgatttttccatttacggtcacactcccctccgtaggattgagaacacctgtgacaatcttcagaagggtagatttaccagaaccattggtaccgatgattcccacacattctccctcatgaaccgtcaatgaaatatcctccagagcaaagtgatccctgtgatagtttttgtgggtaaaagacagggactctctcaaccgatccgtaggtttgtcaaagagcttatatacttttctaacattctttatttctactgcaatatttttcatgtttcctcctataagacatctgagaagtgaaccctcagctttttaaaggttttgaatcccagaatcccgaacaaaatggttactacccagaaataaattcccatagtcccatggtgccagaaccagattccattcatataggagtcacggtatccctgcacaatataatacacagggttcagcttcaaaaaaaactgtatcttagttgggattaaagatatatcatacataatagggcaaagccacatcccaatctgcagtgcaatgcttaccatttgataaaaatctctgaaaaatggcacgatggcacaggtaaaaaagctcagaccgatggccaggcacagcgtacagaacatataataaacaatctggacaaactgtatcggcggtatcttccccataatgacaaacagcagcacgccaaagcaaataaaaaagatatgcacaaatattgcagataacactttaacaataggcaggatactgattttaaacactacttttttcacaagataactatattccaacagacagttcgtagcacttaacagcgcctctgagaagaaaaaccaggggataatgcctgataccagctgcagtacatacggatatcctgtatctgtcggctgcgccttaaaccctacctggaatacaaagacatagattaatacggtaacaattggctgaacaaaagcccagaagattccaaaatatgaaccggagtatttggttttgaaatcattttttgcaagtttccatatgagtttcctgttcgccaacagttctctaaacatgttcatgtaattttctccttacctatttctcaaaatcctgtaatccgccccatgtttggtccttttcagaaatagttaattccattccctccggaatcggccacgcaatccctatttggggatcgttccagataatccccccttcatcgttgggatgataaaaatctgtacatttgtaagcgaactctgcaacctcagagagcaccagaaagccatgggcaaagtctttcggaataaaaaactgctttttattctctgccgagaggagttccccatgccactttccgaatgtgggagaacccttccgcaaatccacagccacatcgtatacctcacctctgactacccggacaatcttatcctgtggataatgaatctgaaagtgaagccccctaagaaccccctttttggaacaggactgattatcctgtacaaagggcatatcaatgccggcttctttgaaatcattatagttataggtttccataaaataaccgcgttcatccccgaaaaccgcaggttcgatcactctcagtccctcaatttcacaggttgttacttttatttttcccatctttcgttaacctcgttttatcaattattgtcaaaccaaactaccctgtgtttcttcccgaaataacgctacaggccttccgccacttccatcagatactgaccatatgcagtctttaaaagcggctgcgccagatgaatcagctgctcccggttaataaacccgcgtttataggcaatttcctctatacaggagatgtagagcccctgacgtttctgaaacgccgaaacaaaatccgcggcatccaaaagagagtcatgattccctgtatccagccatgcaaatccccttcccagagtctctacctgcagggtacctctcctcagatattcattgttaacactggtaatttcgatctcgcccctggctgaaggcttcacatttttcgcaatctcaactacatcgttatcataaaaatagagtcctggaactgcatagttggactttggatgctccggcttttcctcaatagaaagagccctgccgctttcatcaaattctacaaccccatattcccgggggtctctgacataatagccgaagatggttgcccccttttcacgccccgcagcctgctgaagcactttggaaaaactctggccgtaaaaaatgttatcccccagaaccagtgccacattgtctgatccgataaatttctcccctacaagaaaggcgtctgcaagtcctctgggagactcctgaactgcgtatgacatatgcagccccagctgttctcccgtcccaaacagctcttcgaataccggaagatctcttggtgtggagattatcagaatctcccggataccggccagcattagcgtggacaggggatagtaaatcatgggtttatcataaacaggcataatctgcttagagattgcttttgttaaaggatacagcctggtaccggaacctccggctaatataatacctttcactttataaatacctcctgtaatcttgtttttaaacacaacaattgacccgtcagaagatgccgtgacgagccaactgccctgttatttattgatacatttcctcataatacttctggtagtccccgctggtaacacgtttcatccagtcttcatgttcaaagaaccactgaatcgtcagacgtattccgtcctcgaacttagtctcaggataccagccaatctcttcctttatcttatccggtgcgatggcataccttctgtcatggcccttccggtcttccacataggttatcagttctttgctcaccagcttcttcctgggatctccctccggcagcatatcctggagcgtatccagaataatatgaataatttcaatgttctgcttttcgttgtgtcccccgatattatatgtctcaaaaagcctccccttttcctgcaccatgtctattcctttcgcatggtcctctacataaagccagtcacggacattttttccgtccccgtagaccggcagttttttgccgtgaagagcattattgatgataagaggaatcagcttttccgggaactggtagggcccgtagttattgctgcagtttgtgatattagccggaaatttataggtatccatataagatttcaccagcatgtctgaggatgctttacttgcagagtatgggctgtgcggatcgtagggcgttgtctcatagaaaaactcatcctcattctccagtgaaccgtatacctcgtcagtggatacatgcagaaaacgcttatcctctttatatgaaccatcgggaagttcccaggcggccttggcagcgttgagcattaccaatgtccccagcacgtttgtttttacaaagatatccggatttttaatacttctgtccacatggctttccgccgcgaaatgaaccaccctgtcaacatcattctcctcaaaaattctgttgatcgcctcactgtcacagatgtctgcttttataaatgtataattatccctgtcttcaacatcctttaagttctccaggttgccggcatatgtcagcttgtctacatttataattcggatcgcatcatcatatttttttaacatataatggatatagttagaaccgataaagcctgctcccccagtaactacatatgttttcattggtttaatttcctccgtaaattctcgtttaaaattgcacactgcttattattatagcatttaccgtgctatgtttcaagattttatattttatgcagatagtacctttgattatctttttctggccattttacaaaacatgtattaaaatattactgaaaggaaggtactacaaatgaagaaaaagtatattggattcataatctgtcttatacttatatgtgctgttatgttcgccagttacagaagatttcaatcttctcacacaacttggaccatcacacaatatggagacaatgacggaaaaaaccaaatgttttataccatcgagtcttctgcaggaggacttgtagtagttgacggcggatggactgataatgaagaaaatgtaagagaggcaattgcagaaaaaggaaattccgttgatgcctggattcttacccaccctcatccagatcatataggcgcctttaaccaagtctacgccaacccacagggaattactattaaagaaatctatacgattgctctggattaccaagcgtatgaaaaaaaggcccaggaatgggatgatattaacacctataaaaccttcttggatttgacgaaaggaactgacagcctgaaatatcttcataccggtgacagcttttctttgcttggtctaactgtaaatgtattcagcgcatacgatgaccatgtagatcaggtaaccaatgatctgtgcaacgatggatcactcatgttcaagatcaatggaaaagaggaaagcatgcttttctgttccgatgtgggcgctgttatgagtgacgaaattatcgcagcgtatggttctcagctcaaaacagattacatacagatgggacaccatggaaacggaggattaagcgaagagttttataagctcacccagccgaaagcagctttctttgatgccccagactggcttatgaataataccaatggcggcacatataatacacctgaaaaacgggatcttatggcaaatatgtcagctgaaatttattattatgcaaccgcacccaatacgatatatctaaagtaaacaataaaatctgatggagacatttagaaatatcgataatttataattttctggtacctgcgttctcgatcgctttaacagtcagatggcagggattactcaacaggcatccctgtcatcttctgtgttattctctacctcctaatgcaaaatctcccagccccttgctgaacaatacttaggccaaaaaactctctggccaccttaactaaatagaatgcatccttcactcctccagtctcatacggagagtgcattgccaattgagccaaaccaatatctacagtgttcatagcagtttgattgtttgctatatttccaagggttgagcctcctgcgatatcggagcggttagtaaatacctgacaggggacatctatctctttgcagagtgtcttgaatacggcagttgccaccccatctgtggtatatttttggtttgcattatacttgagtacaattcctccgtttaaatacggccgattaacaggatccgctttatctccatgatttggatgcactccgtgagcattgtctgcagagagcataaaacttgacgctagagccatatagtattgttcttcacttctgcccagactcctattaattcgcatcagtgtgtcctttaaaaaggtagacgccgcaccctgctttgtcccgcttcctacttcctcattgtccagtacacagtgtaccggaacactctccccatcttccgcagtcagaaacccccggaaggacgaaaatgcacattccagatcgtccagcctcccgcttgagatatactcctccccggcgccccagaaagtgcccttcactctgttgtacaaaaagagatcgtgtcccagtatatcctcttcgctaacttctgcggcatctgcaattatcttcatcagactcccatttgcagtctcatcccccagtacaggaagcatatctgtctgtggattatacttgtatccgtcgtttacttctctgttcatatgaattgcaagattggggatcatcaccagatccctttctacatttactaatctggttgcaatctctcccccttcattcaccaaaatccgtcccgcaatggacagaggacggtcaaaccagggagcacagagcatcccgccgtatttttctacattcagcttcgtatagtgtttttccgcctccatctccggattctctttgattttaaaagtaggggaatcgctgtggcttgccataatctggtaccctatatagtttctgcggggaattctgaaggcaatcagggaggattcatttctagccacataatacttccccccctccttcagttcccaggactcactctccaaaagttcctcatacccttctgtatgcaaaacctctttcatattttttactacgtgaaaacatgtgggactcttccctataaactccaggagttcctccgcagttctgcggtactcacaatttttttctgtcatttctatcctctccttttccatcaaaaattataaccgctcccttttcgccagatacggcataacaaagcccagacccaccaaaaggaagggggtaacaatatttaataccagttgaaaggaatcctctgaatagatccctcccacgcaggccgcggcagtaaataaaaagcaccatccgcccagcagaattcccaacgtcttactttttacaaagcggtactcagcgggaaaatcctcctgcgactttttcagggcaatgtatcccacaaatacccaaaggtacctaaggggcatacagacagagttaacctttatcagccagcgaatcagtacatccacgctgccaatccccagtgcaggcacaataattaaaactgccacaataatcataaccaatttatgtccatttgtatatgccccatttgcattttgaacaaacatttttttaggaataaactcgtcgtccgcacttcctaaaagcattcttaagggggcatcaatggataacaccataacggagaattgaccgattagatttgtaagcgcataaaaaatcacaaaaaagttccctgcatggtaataacctccaagcttctgaaatgcataatacgcgccgttggtcatcagatcatccgggatatggcgggaatcaaacatcattcccatagcaatggttcctagaattgcacagactgccaccataacagccaaagctatcatacctttggaaaaatctctggagggatccttcattttgtttacataaggggaaattttctcgcatcccccaaccgcaaatactaatatggacaatcccgtaaaaaatttcatatcaaatgcaggaagaaatgtgtcccaatcccagtgtatattcacaagcgacgcatctgtaataaggggggctgccatcataagcagtatatacagcagagacattacaaacatggcagttccggcaagggttgccagtgtcttcaaaattcgtatcccttttgaggcaatatacatggcaaataaaaaaacaccaaggcagatgccctggaggactaatgtattcatctgacttgcccggttgtcctgaaacagtgcccagcttcctgcaatcagggcggcactgggtttttgagaaatataaggcatatggacaatccagtacgtccatccggcataatatgccattttaggaccaatagtctcccatatccaggagcttacccctccgctggagaatttaaaggcagaacccagctctccaaccatcagtgcataggggataaaataaataatgaagatcagcagccatgagacgattgccttcaggcctccgtattccgcgaagccgttgatcacattgccgaagctccagactgtggagaaggccatgaaggcaaggctgtgccacagaatcttttttgaagttttctgtttcataatgggatattcctcctgtagttgcccgattcaaaataagaattgatgggggatattaatatagaggattcccatgattaaaattattatccataatttgttatttgaacattgtaagatctgtgtaaaattttgtatgattatgtaatattatatgttatgattcttaagattagtttaagatataaatagtataatttaaattaaatatccaagtttagatctgatttgggaggaaatctatgaaaaattattgtcattataataaaaagctacttttttgcagcctattttacatacttctaacactccttttgtactcctcggtgaatcaagcatatccctattccctacaaaacgcctgtctattaatactactagtactgatcacagttgggttgatacctcttcagctatgtaaggagacgtttttattaaaaatctacggtattttcatatttattataacaccttttatcacttacataatgatagagtttttaaacaataataatgcattacagttgagcggtatacgtattgccatgaaccttttctggtattatgccatgtattgccttctctttgtcttaagtaaccggacttcacttgccttagttgtcggtaacgtcttttttgtttcagcagggattattaatcagtttatattacagtttaaaggtgtccccattcatcctggggatttgctagccttacagacagctcttagtgtctcagatgcttacacctttcaattgaaccaaactatgctgcttgttattatcattacagtattaatttgtgtactggctgtaaaaggcaatctctcatgctataaatggaaagtccgaatacctataaatctatcgctaatctcgatcatcttaatttattcctcattttttttcgataagcaatatattgaaaagatggatgttaggccttatgtatggagccgaacacaggggtatattgataatggaacactattgagctttatgacaaatatagaatacctttttgctgataagccagaaggatatactaaagctgctgcacaggaagtattatcttcttactcgaacaatactgaaactggaaatgtagtgataaataatgaggctcctactattataactatcatgaatgagtctttctctgacttgaccagattaggagttacagaaatgagcagtgactatttatcctattttcattccattgacacacccatggttagcgggaatctttatgtatccatctgtggcggacttacaagcaatacagagtttgaattcctgacaggtaattcaatggcccttctgccagaaggcagcataccatttattaattacgtgcatgagggtgcatcatctataattggagatttaaacgaaaaaggctataaaacccattttatacatccttatgagagtactggctgggggcgggatattgcttatcaatgcttcggtgtaagtaataccagttttattgatgatttctacgatccagaattattacgaggtaaggtaagcgatcgcagctcctatgataaggtgattgatatttacaataataatgatactaacgcacctctttttatctttaacgtaacaatgcaaaatcatggcggctatgatacaggttatgaaaaaagcgttacacttaatatgaagggtgattaccccctcacagaagaatatctttcaatagttcagcaatcagactccgcactccaatttttgttagattatttttctcaagaagactcacctgtaataatacttttcttcggagatcatcagccttcaatagaagctgaactctggaatgaagtaattggaaaaccagaagaagaacgcactattgaggaaataatgattaattatcaggtacctttcttcatatgggctaattatgaaattgaggaaaaggagtactcacatataagtgctaattacttatcaaatctcctatatgagactgcaggactgaacctaaatgattatcaggtgtttttaaaaaccctgtatgaagactggccggtaattacggtacgaggatgtatggatacagatggccaatggttttattatgatgaaattaaagatctggaggaaatcaagaaataccagtatgtagaatatttgaatttattcgattactaaagtgcttattacgcttaatgcctatataataccccaaaatttacattagtaacatacccctggaaataaggctacagtttatcttaattgattcctgcagggatatcaggaaaaagatatggggcatcatgagtcgtaaaatcatgatgccccgccttaggactatatatcgctcggcagcccattgtatttaaagttaacatcatggtatccaaaccccattagatgataaattgtaacttttattattaaggacaattcttcctgttgccattgccccgttagaattcaggtaataccaattagagccgtccagcagccagccagtactcatagcgccatccacactaaaataataccaattattttttatgtatttccagccgatcaccatagctccattagcattaaggtaatactttttatttcctaatggcagccatcccactgccatatcaccatttttatataaataataccaaattccgttgtccaaaagccatcctgtagccattgcaccatctggctttaaatagtaccatttattatttatatatttccaacccacattcataattccattatggctaaaatagtaccaattgtgaccaacttctttccaacctactaccatagaaccgctggaatcaagatagtaccaataaccattatctaaaacccatcccgttttcatcgttccatcagtgctcataaaataccatgcattcccaatatatttccagcctgttgtcatattccctttttgaggaataaaataataccagtggcctgcaatctggttccaacctgttgccattttaccatttgagttcaggtaataccaaactccatttaattgaatccaaccggtatgcataaaactgtcatttccaaagtaataccaatatccatcaataaatttccattcgttttttgcaaatgatgtatctgagttctgatatctccagaatccgccttcctttttccaacctgctaccggaaaaggttgatctggctgatagataccatctttatctacataatacttttgttctatccaacagtctctttgcattttcccctcattatcgtaataagaatacgcttgactctcttcatcataataccacccggtagcaaaggatccgtcttctgtgataaaataagtatcttcaccatagctccacctgccaacatcagctagaacattacctttatcctcaaaataatattttttaccatcaatcttctgcattccagttttctggtaacacgtcctgccaaattcatcaaaatagtacaacgcatcattaatccagaaccagtcaggcgtcaggctaacatagtcagtggttattagctctggtgttatggttgccacaacagctgcagaatttgtacaagtagaaaagatctgagcaccttttaattccgccatcatacgtgaatcctctgtcacccagttcatagggcccgttgtaactactgttttaggatttaacgaggtcaaaaaatatgagggattgttatattctcgaccatgatggcacattttcattaaatccaaagaaattgtcctctggctggtattaggtgaatctccttggtttggagagggaacaggagcaaggcggctttgcggcacgtccataactatatcatccaatgtattctgcgcatgttcctttagagagtgcatactgtcgccttcgggcagttcaatagtgacgctagaattcatatcattctctatgtcttcagaattataaagtttatcaattatttggtctgcaattttaacactatctccatcaaacggttccatatctgaagttagaagaacagtcttatcaaaagcttctattaaggtaactaaacaattgttattttcacttgataccggtatgatattcccctcttggtctctatctctctcgtagtttagaatttctatatccatatctcctagagacagaaacctatactctgcgttttcttcaaaatccagattggtaataatttcagttccagtatcttctgctgcctggataatacggtcataaacatattgattatcccataagcggttctcctcagcatcagggttaaaatatggatcttccggatttatgccatgcgcatctgtcatatattcgtccttatattcatttatatataaccttttcgttggaaaatgcctaataatctcatcgcccgttccgatatgatcactatgcgcatgtgtagcaatatagaattccagttcttcaactcccaatttctcaagataatgtattacttgagggtcgaatcccaaatgagtagttatcccttctctaagaggatactcttcattattaggataatcccagtcttcaccagaatctatcaaagcaaaatgtccattgctctctaaaagtatcgcatcacctgtagtatacaaggatataaaatgtatttttgtcccaccttcattcccctttgcagatacacctatcactgatgaaaacaataaagcaaatagtagcattagcataaatactatttttctactttttatattctttatcatataaccttcctctcccctatcacatccatgattttacagaaatgtttatatgcactattttatcctgcacagtgttttctatgtatataataacattagtatagtatatggataaaatatgtgcaatataaaaatattactataaattcaatccagaatatttatttgcttgtttacatattaataatatgttatgataatctgcggaacttatttatgtattaaggagataaatatagatgttagtcagtattatagttcctgtatataatgcggaaaaatatttaaaagtttgtattaatagtttgttgcaacagacatttacaaatatagaagttatattaattgatgatgaatccacagattcttctggagatatatgtgatgaatatgcaatcaaggatccccgggttaaagtgttccataaaaagaacgggggaactgctgcagccaggaatactggtttagaaatggctactggtgattatattacttttattgacaatgatgactactggattaacacggaatgtttgcaggaaatagttaagcaattaaccgagagtccttccgatgtactaatgttttctacaattgattactggcaggataaaaatcattataactacccttcaaggacctgctcaagaagttctgtcttgcaccaaaagcgtaccgatgctatccggtcaatcatggaaaaagggcttttataccgagccgtttggtctaaagtaataaaaagggaattgatattaaaaaataatttatatttttcttccggtatacggaatgaagatactgactggactgcacgaatgttattagctgccacctcgtatgactggtatgaaaaagctttctatgtatatagaaaaggacatacagaagcacagactagtaaacctaatacttatcaaacccttaatgatttaaagagcatctgtattaaatatatcagagcggctgaaaaaattaacgatgcagattttaaaaaggtctatctaagctatcttgcttatccatactccgtctggatggcgcaagctgaatttattaaaaatgatattattatatcagataaacaagaaatgaaacaatattcatatcttttaaattatgatatagatcctggtgtaaagctagtagcaagattatacaaaaccttcggctataatataactgcaaaattgcttaaattttacttaaagcttaaatataagattgaaggttgaatatggataataaaataagagttactaagagacaaatatacttttggaatttagcaggcagcctgtgtaatgcagttacatccatgattcttttaatgattgttacgagaaccacagacaattattatgccgatatgttcagttattcttttgctttgtcacaactgctggttaccataggactatttcaagtaagaaactatcaagcaactgatgtaagagaaaagtatgaattcacagactactttacatttagaatcataacctgcttcattatgatgatatttgcctttttgtatgtccaattcaaaggttataccttagataaaaaaattgtaatactttttgtatgtctttacaaaagcattgaggcaatgtcagatgtttttcagggtctttttcagcaaaaagggagattagatttagcaggtaaatctttaaccttaaaggcagtcttctctagttttatttttgctgttggtatgtatataactaataacttaattttatcatgctcattattatttattagctcctgcctctgttttgctttatatgatttaagaaaatatagagaattttcacagttaaatcatgttattcaacacataaaaaaatattataaaagattatatggtattttcgggcagtgtttccctctttttattaatggattccttattatggcaatatataatgcacctaaaaatgcaattgatctatgcacggaacaaaatattctaccacaaggcattcagacagattataatataatctttatgcctgcatctgtaattaatctttttttaatatttttacggccatttatgacagaaatggcttatgctttatcacaaaatagaaaagacagattttataagatgctctacaaaataataggaggtttatttttatttggtatattatctattatcggagcatatttgttaggtatccctattttggaggttatttattcgagacacttaaccaaatataaaactgaacttattatgcttatgattgcaggaggaatgagttctttagcaacagcaatcgataatattataaccgtaatccgcattcagcatgtactcgtcataagttattttttatcctggatagtagctagacttattgcctatccattaatagaaaaatatgctctctatggagctgttgtcgcttttatggttacaatgttaatccttttgatatgtaatcttctaatcttgttatttggtctaaaaaggcataaagataaacgaacaggctgtgactgaatggtcacttacctgttcgttcgtcgttatattacctaccaacaattctggaaaacacctgaagaactgctacaacctgtatacacgtaaaaagcataaccagataattatctatatttcttttcaaaaccactactctgcttctaaacataaaaataatcaaaggcagaattggaataaagtatctcccctgcacaccatcaatatggtctctgcccaacggagtaaagtcaagaagtaacgctaataaggttgctcctattacagcagcacaaatgcagcccatccatactttttctttccagtcgaataataacacatccctctctgttttcgccgacgctaggagtaatagaataaaaaacgcaatgacaaacatccaaggtaaataaatcaagtccttccaggtaagcctacatcctaacataccaataagataatcatcgccatttactcggatcgtatttacaaacattctaatagtataaccaatattctgcagcaacataggcagagtatggctttcaaattcctgacccaaaccgccataggtttgtccctgggccatatttgaaagagaactcattctcgcaatccctattgacagtataccagtcgtaagcaataaaccggtccccatccatttagttccttttttagcgaattttgattgaggtatcagcagaattaatccagccaaaacgcagtaaacaatcttcaccggtgccaggaaaaaattcataaccataagaattataatatttatccatgttacagcttttctattatatgcacaataaaaacagtagccaatcaatccaaagcttagcatattaactatagtgtcatatgaataagaagtagccaattctagcgatctcggaagtaatgcaacaataaataaaaccattttcccagctggcagtttttttatagaccagtaacatcctagcaaataaaaaatccctgcaaacagttttcctaaatacaaggtagccactcctccaagccccaacagcattcccagagcaactccgatagcctggggtagataactccagaacggaacattaattggtccccgttcataagacgcggggcttaaatcaggatcatgttcgaataaattgtcatggataagattatacgtagattgatccggtctccaatgattactgtttataatcagatccgttttacgtatcattgtattcccgttctcatctaaactttctttcatcaataatttgtcagcaaccgcatatgcactggctatatgccctggttcatcaggtgcagacatgggggggaaaactgccagatagacaatgagaagtatccctcccaccaataaaaacagcctttccagtctacatctctttatccttatcagaagatataccgctagcacaagggcaaatagtataagggaaataccccaaaacattttacttatataaggacttttacctaacaccccaaaagcaagagtgccctcaattactttacccgcctttgtaatttgactgttaaaataaacttccttttttgtgccctggagtattaactgtgtagaaagctccgcgctttctacagatatctcaaattcaatatcatctccgattttagattcgacaggagattcgcaaattaactccatactatttttagtaagagcttcatttatatcggtattccattcctggcaaactacattgtttttcttcagagcaactctaattataccagaagtctgcgcatcagaagccttactaattttatacttaaagctaattccacttatttcttcccttgtagcagtaaatgaaacagtggctttttcaccatttctaagttctatgatatcttcctcggcgttcaggttaaataaatatgcactgattttttcattagctgccttttgaaaaatctgttcgttataaaatataattactactaataccgatattaagataaaacatacctcaagtattttataaattgttcttttggttgttgcattgatcataatgcacttttactccttcgccgtatctatcctcaacatagttatatttaatcccacttgtatctatcacgaaaatgtacaacaactcctatccgaaatgccactgttaatatctctgtgacacacgtgattattgccactgtctttgcactaaatatacccaacgcaaaaagaattattaattgtattatctgaatagccgctccaattacattagaaatatttgcataatttgccaatcccaccggggataaaaccggaaatccaaaaagcatacctggaaaagcacaccataccactggcgcaagcaatcttaaatacgtccccgcgcccctgaatgcttttccaaatagcaaaacacaaatcggttcagcaaaaacggcaacaataatacatcctatggttaaaatcggtaaaaatataattaatattttttttatgagtttaaaatctttgttctttaccatatagggataaaggctgtcagtgactggagatatagcttgctttcctgttgtgattagcttatctgcagacgtgtaataacccactaccggagattctgtgccataaaaaatgccaagaataaaagtattggttgcgctatatatagtagaggcgatcctagagtagaaaaaaaagctggatctttttaatgcctcaagtatatcttttattttaacgccacaaagtgttattcccatttttttatttaaatgccagtatactcccagcaaagcacctgagtttcctattacatttaaaataggaataataaggtattgttccttttgtcttaagcaaagaaaaatcattaatgtaaaaaataattttatgagaacagttctgatcgttatggccttcatttcctccaatccccgataaagaaaatccggcaaaaaagaatttacagctatggaaataaaatacagaacatataggcttacgtcctccttaaaccttcctacactagaacacaagaataataatacaatacttgataacaaaattagcaataatttgcaggcgctgacacaagtaaaaatatgagacagccttttaggatcatcccgatgctgagcaacctcttctgttgcagaaagaagaaacccaaaatcaagaaataattgaaaatatatcattaaggataccgcaaaccctattttaccatagattatcgggcctaacactctggtctgataaggtactgttataaaattaaacaaataattagaaaatgtaagaatatacaacataatagtatttgagaatagcctactattcattttcactttatcgctcataattaagtctccattttttcaaatgatgacttttctggcaaaatcgtctggaaacagtctttgataaaatccttttccttttcaaaatccatattttcattgtcatcactaagacataccatttttacagtttgatttttaattgccctttctatctcaatatcatctctcccaatgctaaaaaatcttcctatatttgtagttctgggatagaaagaaccagatactaattgccaatatcgaaaaagccagcaattgacatcttcaactgatctaattttatgaagacaggtactattaagtttttctgactccatttcccatacctttatatatgtggactttttcaatgatattggtaagtgaggatccataaagcccgtaaaatctttaaatggatacatatacagatttctaaaaagctgctttccataacagcgggaaaaccactttctgctatggtttctcctgcaatcccgtttttcaaaatgttcatttataatctcaagattatttcctataatgtgatcaatacctcctttatgaaattgcaatgcagtttctactagagagtcacatggaagtccttctttaaaaaacatatcaggttccatttccttcagaaaaaacatgtcgtcatttgcatagataaactgttctgccagaccctttatcctgtgaaaattcatctctatagggtggctgctgaatgtaggtaggtatatcttaggtatataatctgtatgatttacaatattaagctttttacagcctgtatttaaccattttggcaaatggccccaggttacaaaatgtacctttctcacccaaggcataaacttctctattcctctaaatacatattgaagattatcccagtcccgaaatcttatatctctgctgtctcccttgaaataaggatcatgcgcatttttcacctccctccaattgggatcactgccgtctacccaggcaatgacaacatctatactgttatccatagttcctcctgcttctaagcactaagaccagtgtcttctttcattattaacattgtcatatttcttgcaatcttccttttgcaaaaagtatattaagtatcccagatacatccaaaataagttggtacttggaacattgtaataaaacatccctgctgcgaccaacatactctctattccaatacacaataatgagattagtatcacacaagtcactggaaaatccaatgtctttaccttaaaaagctttaaaaaaacaatactgcaacactttataactagtattaccaataaaatcccaccgattataccttgtgaaaccaaaacgtttagaaactcattgtgtaaatttttaaaatccgtttggctattgtttactatatatgtctgaggcatattctccctggcatatggcctgatgccattatacgaagtgccccagaatttattctggttaaaaatttcaattccacttttccaaatatcaaatcttctattactgggatcctgttcaagatcatacgccctttcaattttatctaaatctccgtgttctgttgttaagtgcccctgaactgtattatagctaatggctatccctttggggacacttgtcattactgcaactgctgcgacagatattaatataattctaaaatagccccattttccaattccatcctttttccgcttaataaaaaagcaatacaaataaatccctgatgtaatgcctagacatagtctccctgttctggaatcagaaaaagctataaagctcaacatgagaagaatattaatagcccctaaagctttaactgactttcttaccactttactcataaaaaacaacgtcagatagatggaaacacaggccattacagcaccacaattgggatctaaaaagacaccgtaaagacgtccccatacaaaccctgaaacaacttcatatccatctgccagtttcctcacattaccataacctgttaccataaaagttaaactgatagctacagaaataaacatatataataaaaaaacaacgcttacaatttgaaactcctttaaaacttttttcgtttcaacggaacgatcatttgcatatagcaggaaaaaataaaatgctagaaataaaccatttattatattttgtttgagttcaaactgatagttaataactgtagacagaataaagcttatgaaaaaagccattaaagtaataattaaaggtgttgttatatattgtttaaaatatacgattctataagccaacagaaacaggcctacgacaactaccggccacataaccaaagaaattataacggtaccgtacgtcagactattatacgataaaatcgcatatagcataaatcccactttaaaaagtatctctaaaattttaactaatccctctaaacttcccttatttaccacgttatgtctctcctttttaagtatcaaaaaactgcaacagcttataatatgtttctgaatgttctttcagactatatccgcgttcctgtaacttatttatattagaaatacgctttgcattttgacagtttaaaataacgtttgcccactcccctggggatttatttaaactgcaaaatataacatcacctgtaatatcaatttctttggatattgtatcggaaagtatgcatggcagagcggatgcctgtgcctcaatccctacaattggcagcccttcataaaaagatggaagcagaaaaacatcagaagcacataataactcaggaatgtcctttcttttacccataaaatatatcttatcctttattccgatattaacagcatattcatgaatttctttctccaattctccactgcctatatagagaagcaaactgtcaggtttcctgactaatacctctttaaaaatcttaagcaagccataaggatttttttgttcagatattcttcctatatggcaaaccacaaactgcccactaatatttaacaggtttctggttcttattcttttatgctgattaaatttgtattgttcaatgtctatagcattgggaactattagaacttcatcctttttattatctccaaacataaaagaagcagccagttgagaacatgctacaaatttatctgcaaaaaggttcaataaaggccgacaataattatgaagtcttaatttatctgtagatccgttatggctatggacaataattcttctcttcagcatccatggaataagcatagtaacagctgctcccgcatccaatatattaaaatacactatacggtactccggatgttctcttaagatcctccagagctttgtccaatgtttaaatagcttttttcccttgggaggtatataaaacactttagaattatagcttaagatttcttccttatatacaatctctggaaaatctgttacaaagtcaaaagtaattctatctttgtccaaacttctcaaaatattcatcaggtaggtttcgattcctccagggttgttcgtcatcccataaactaaaatacgcttcactttatttactccctcatttattgatccgagccctagaaaaaactataggaaattttacttttagccagtatgctacttttcccattaagcaacaacaattaacacttctatgattcaaaaaaaagcgaaaaacttttagcgatttactttttacgtcggcatatttacttacggctccatataattcagtcgtaataacagctaataaccactctttaatctctacaacagtcatattggaacgattatcaaaatttctcatcagagcagataatatatatctaagatatatatttcccaatatatctttcacatcttttgtacacattccccacaaagaatacaattcgtacatctcatggacacgtctagtactaagtttgaaatattctggaacgaatctagctgtaatgctttcattcatacgctttttataatgataggctgaactttccaaaatgctcatactttgaatatactttattaccaacacgttaaaaaagaaatcttcatataaaatagaatcctcaaatcgaatattattttcttttattaattccattcggtagagtctgttccactgatatccaaacagtgtttttctttctaactctatgaccattttacgtacgtcaactaaatccatacagtttcttttttccaaagaaagaacattttgtaatactagtttattgtcattgttatagtaatcttctgtaagtccccagatgaccatatccaaatttgacttaccaatactcagtacagcctcatgatataagttctcctctatatagtcatctgcgtccataaaagcaagataaacaccactagcaagctctattccggtgtttctggcatttcctgcccctctgttttttttaaggtgaacaaccttgacacgtttatctgcaagagcccacgagtcacaaatttccccgctcttatctttggagcaatcatccactaggattaattcaatattggaaaaagtctgatttaacacgctctttacactttcatctaaataacactgggcattatagactggcattacaacactaataaacggctcctctctcacactttatctccttgctttcagtttcgcaaatacctttgtatttctagttttaacaaaagtaataacctgggcctctaataatgttaatgtaacatttttccacttaatgggacgcagtaataatttcatatagtttgaattcggtttcgcaattctgcacgtctgagcaactctagtttttgatagcatcttttttacttccgtcctcttttctctatatgaaagatcacagttagggtttgtcagattttctacacatcctacaaaacgttcaatataacgtctggcaatcatttctttgctctctgcattgtgtacatcccaatatttatagatgtccagcatccattcatgctcctcttctcttttttggtacatattcggtcggtaagctgccgtctcagactccgctcttgccctcatgaagtggtaatacttttttgaagtaactgttacccggtcaatattttttactatgctgagattaaatggaaaatcatcccagaaggtctgcgggaatttcaaattatttgactgaatgtaatctcttttaaataacttattccaaggagtataaagcagattcttatcaaaaagcttataggcattttttctaaattcatctttattcggatataccgcatcatcagtcacaaattcatccgtcagatatctattttcatcgtaataggtgtcaatataaaagcccgcaatcactaattgtgcactatctctttttgccaattcatacatatcctccaacatagtagattccgcccagtcatcggaatccataaaatacaaatattccccttgtgctatgtctattgccatatttcgagcacttggtgcccctccattttctttgtggaatactctgagcctttcgtcttgtcttgcatactcatcgcatatcttaccgctgttgtcaggtgttccatcatccacaatcaaaaactcaaattcctttaatgtctgcttttgaatgctctcaattgcttttccaacgtatttttctaccttatagacaggcattataacactaactttaatatccgtcatcaaaatactccttaattaaattcctggtgtaccagattaaaagctgaagctatcactttatccatatcgtaatatttatattcagccaatcttccgccaaaaattattttatcttcgttttctgccagttccttatatctaccatataaatcctgattcgtatcatcgttcaccggataatatggttcatctccctctctccaggaagcaggatattccttggtaataaccgtcttcttctgtgtaccgaattcaaaatgcttatgctctataactcttgtataaggggtctccctgtcagtgtaattaaccactgcaactccctgatagttttccaaatccagcacctcagactcaaatctaagactcctatactccagcttaccatacttataatcataaaaagagtccagagttcctgtatatagtaccttattgcccatctgattaaatctttctttttctttgttataatcagtattcagcataatatcgcagccttcgaacagtacattaattagttcattataccccccaacaggaattccctgatagggatcattaaagtaattattatcataggtaaagcgaaccggtatacgtttaataataaagggaggaagttctctgcagtctctcccccactgtttttccgtataacctttaattaacttttgatacaagtcagttcccactaggctgattgcctgttcctccaaattttgcggcacattactaatctggcttctttgtgaatctataatctttttagcctcctccggcctgctaactccccacattttattaaatgtattcatattaaagggcatgttataaatctcccccttataattagcaatcggtgaattggtaaaacggttaaattctacaaggctattcacaaattcccacactgtcttattattggtatgaaaaatatgagcaccatatttatgaacatttataccctctatattctggcagtaaatattgccgcccaatgtattccttttttctacaacaagacattttttccctttttgttgtgcaaggtaagcaaatgttcctccaaatagccccccgcctacaataatataatcatatgttttcatcattctttccttccttttcttcttcaccgcaaggtaaaattctcaagccgcaattctccgctccaaaggcttctgtactgtctgatttcaacaatacaatagctgtctgaaaaagtaactgtatatcttttagaatactataattttcaatatacatcatgtccatcataagcttatctttagggcttgtattgtatttccccgcaatctgagcatatcctgtcaaacctgcttttgctctcagacgatacttaaattccggaagttcttccgtataagcgttaacattctctaacatctctggtctggggccaacaaaactcatttctccccttaagatatttagtaattgaggaagttcatcagctcttattttacggagtattttccctggcggtgtaatcctgtcatcatcctttgtcacagaacggttctcaacattttctttcatcgttctaaacttatacacttcaaattctcttccgtttaaagttgctcttttctgcttgaataatattttccctccatcatagcttttaatcataattgcgctgaccacccatactgggctacttaatattcctactattagaactaaaatcaaatctaataaacgtttcattatcctttgctcaatagataaggattttacattagcattaattaatgatatatcatccagcaaataatattctgcagtagtttcaacaatatcgtgtatctctggattaaaatatatgtttttcatgttttcatagcaatagtcaattaactttcctcttgcttcaagcggtacgtcaataacaaatatcgtatccacctgttccacataccgaagcaaatcatgccttctataatcaacaacatactttattaggtactgtttcctgaatttcattatccctcttgcaatttcatttaccgcctgttgcgatgaagctataatacagcatctctctggttcattgataaagaagtataacgcattacccccatatacaaaaatcacaacaattaaaacttgcaacagcataataagcagtaaaattggtatactagtaaagcgaatcgctgaaacactaggcgtaattgtattcataatcatcagttgcagatataccacaacatccgtacagattaccgccaaggataaagaatatatgattggtttactttttcttctaccaatatcataccttccatatgcagatataagcagcaagcctactaccacgtaggaactgatagttatgcccattgtacgggatggaactagtactgctttattctctttagaaatcagcgacaaaaaaatccccagtaatataatatataaagccaattttaatattaataaaaccgtcttttcaaatttctttagtagtcgtttcatttatccacctattatattctaatatcatctttgagaccatttttcattatagcctatcgagatatgataatcaagattctacccacttttattattctggcacatattggttgaacttataaattgtatattcttccaccttaccaatagggttatagttattatcaataaattcttgttcttttgccttatttgacggatagataataaaattagttctacaattcatgcatgcattggttaatacagttatatctgcttcttccttttcaaactcatcccaaataatctcacctaaatcatatccaggagaatatcggccgtatggttgataaataccagcatcatattgacgcatatagcatataaaatcatatcctcctactgctttaatcatttcaccgtccgtactattctcccttataatattacatgctgcaattactttattcggcactttaaacctgttactctgtttcgaaaattgccccttaccatatatacaatttccggtaagtataataagaagacatatacctaaaactgcaattccatatttcaattcttttttcaatctgcctgccagaaaagttgcagcaaaggctattataattgtacttggaagcagccaaaacattctccagtacacattgtcccctatcagatagtacgcaattacataagcagtcaaaggaaatgcatatagaatgccccaaacaacagtatacaaaataaacattttattttcaggtcttttatttttgtaaataattaatataaaaatggagactaaaaataccacccagtgcagaccattgcccagatacattttcagccataataatataaactctgtattcattttttccttcccgtaacttagcgaatatataaatatatcagcgcacatattatattaattgaacagcaaagtatactcttactcacaatttcttttctaaatggcttaattgcatacataagtacaaatattcctatcattattggagtcaacataatccccatagatgacaccaggcaagacgcagtacagataaaaaacagcataatccagtctgccttgttgctattatctttaactgttctgattgcaaaataaaaagccaaaggaagtaaaacatttactaaaacagcttttccctgccatattctaaaaagtaggaaactacccgaggtgtatactgaataataagaaaacatttgaataatagcacaaagaagtaaaaatgtcccctgctgccttttactatttgcaaaaaacctcttacctaataaaaaatataccagataagccattggtataaacaccccaggcaatacagtatgtgctaaaattgtcggatgaatttgaattagagaactccatactgctgtgaaaaccggaaaaggagataacacgtatctacttggcaacacctcatatttaaaccccatatatggatctacttccataagagtatccgtatgcacagctgtacttgctgtggcaacataaaaagcatcatcctgatctaaatgcatatatctgacactcacataagtctgtaatattataataacgattgccgcccaaaacgtccaatgaaccccttttaagcttttagctaagctttctctccatcctgcaaagaacttgtaattaatgcataagccaactgcggcacttattaaataaagaaccataaaaatatacactgccacatgcaagcttattctaaaataaatcattggtagtattagaatttcaaagcttccccatattaccagatagccaccaagaagtaataaaatccaattttcttttttattaaagtatcggttgcagccaagtccaatacatccaggaactataactagccacagtacacacgtaaataattttagcattatgctctcctgctgtttatctacccttaatctaaatattcttcattattataaagaccaattaaataattaatctcatcatttattaataatcggtttttctccttcgaattgtatcaaatatgggcaatgatttatctgcttacatttgggaggtatcttcatataatccccatatattctttttaaaaacttatcattattagctggaagatatacggtaccggtttcaaatggtacttctcgcaacggaaaaagctcactgatcggcaccatatctttaatggatcctgagtattcaaaggatgtcacaaattttgaattgcatttattgtattttctagatgctctgtcaaatcttttataaactgtagtgcctgatattctaaatatcttcagaacataatgtgtcagaaaacaaattgcggcagctaacttgcctttcataccatttattggtatgttagggtaaggggttccacataagaataacagcctgcccaaaaaagtagttataaatgcttgttttcttcttcctgttatattaggcgccaccttatccaatggaaaaatgtctataaatattcctagattatactttgctcttctggaaaattgtgatacaaatttagtccccttcttttgaaggtgtgtaacggtgcaggtataatccgaatctttatatggggttatgagctcataatcaccatctaattctttattgaatatatctataaacttatcgtagtcttcccttaacatcccaacatcaatgtcatcgtcccaagggataaaccctccatgtcttacagcacctatagctgtaccataaagagcaaaatattttatcccatattttctgcaaaccctgtccaaatcgcctagaatttgcagttgtactccgtgcagtctctctaagatctcctcgtcataaggtttgctgtaattatattgcataccctgccctccagttttattctgccactaataataacacaatctattcgtattctcaagcacctgatgttttgccctaagtgtctgctctctcagcatacccaatattctgattgacgaataagtattttccactatatttaggcattttaagctttgaatgtttgtataatcataacatcttaaaaaattattaaatttactttttcatgaattttcctcagttataaaagtcctgtataataaataaggggtagcctgactgttggctacctcttatttaatcttcatccttatcctttttatcttcttttagtttttcggaaatggaaaattcttgggtcagttccttcaatcggttttctaactgtgataactcgatcgtcataaagaagactttgataatcagtataaatataatagataaaaaaacaaaatttaccggcgactgtatccctaacagatatgtgaaaaaactaactgccttagagaatatgctcattaatatcagcatagctgaaaatccgatccaaaagatcgcatattcaatttggagctttgaatatctaattttcctaatcatatataccatcgtcagtatagatatgataattaaaattgtcctaaaaccaattgtcatatttttctccctttctcatctgttttctttggtctatccgttacgctttctaaaattctgaataatcaatattgatgtaagcatcctaaccatatatacaatagatcttcccaaactaaggtaactttgaccttccatacgctcctccatctctacctgtacctctgcaatagttgcaccattttttaataagtaagagatagtatccggttcaggaccatagtttaaattaagggcaaattccctaatcatctttttgttaaacattctcattccagatgtcggatccgttattttgtttccggtcgtcacccgcatcgcaaacgaaatcatactactccccaacattcgaaatgtcttcggcttccttttggtagtaaatcgtgatccaattacgatatcatatccttctttctgcttattatagagtgattcaatgtaattagcaaggtgctgtccgtcagcatcaaattgtatcgcatgttcatatcccttcatatatgcatattttagacctgtttgaaatgcaccagccaggcctaaatttactgctaggtcaattatctgataccccttatcatggcatatattagaagtagaatccttagagccatcattaattacaacataatcatattgtggatactcatgaaccagattttctacaacttttacaatattcttctcctcattataagctggaatgataactaaaacattctttttcttcaaagtattcattcattttcccctatttcgtaactttttgagttcatctccacgattaatgattatacaatatttttgtttcaaatacaatctataagtttcttcttattttgttaatcttaatatttttttttgtttaaaagtgatatactattgaagtaaaatgttttgaaggagtctagttatgaatttaaaattaagcttgtcaattaaacagcggcggcaactttcatatggaatagaaattgtctttttattattcctttttgtattctactttatgtgggcttgccatcaaccttttaactctgccccagatgaaaaaatgaggtatgatatccctcaatatatttatgaacatggggcactacctcacggcggtgatccggaaatcagagatgaaaactgggggatttcctatgcttttaaccctatcttatcctatataatctctgctgcctttatgaaaatagtcagttttttcaccactgactttttttcattgctagttgcggcacgcaccgttagtgttgtttggggtgtaatcactggattttttactattaggatttctaaaaagctaatccctaagacttatcgtccattatttattgtgttggtaacgttgcttcctcaaatggcttacttggcctcctacgtaaatacagacgcaatggctattgcgtcaacttccatcattatatatatgtggataattggccttgaaaccaactggaataaaaaaagttgtataggactggctattggtcttgcactctgctctctatcctattataatgcttatggatatatactgtgcagtatactcttatttgtcttttcaactttatttatgggagaaaaaaaatataattgccagcttatgattaagaagggactgcttatcacgtttattgcccttcttttagcaggatggtggtttattcgaagctatatcatatatgatggtgacattttaggcatggctacaagcagaaaatattccgaactttatgcggttgatgcttttaagccatcaaatagagttacatacaaatccggagggtattctatcataaacatgctctttagcaaaggcggttggattgaaaccacaaagttcagtttcataggatgtttcggatacatggaacgctatctaggagtcagaacatatgacagatatatctacctgattgccgcaggaggtgtcggtgttatttttagtttccccaagcttttccggccaactaagaataagcaatggattagagcaaacattttaaatataatacttgcaatcgctatggtaataccagttttccttacaatatactatgcgtatgcatcagattatcaggctcagggacgatatgtaatgcctatgattattcctttgatgtacttcgctgtcactggtgtaaaacgaattcttgatttttttattaaagaagaaagaatccctatcattactcatgtttacgcaattattctatttattacggttctgcaaacttataaaaatatatttttgacaatgtttcagtaaataaggaggcctttatgatagattttaatattccaccacatgttgggacagaattagactatattaaggaagcaatacaaaacaaaaaactttgtggcgacggaccctttactaaaaaatgcagtgaatggatcaaaaatgaatttaatgttaatcaagtttttttaaccacttcctgtacacatgccctggaaatggccgctctcttagccgatattaaagagggagatgaagttattatgccttcttacacctttgtctctacagccgatgcttttgtgcagagaggcgcatctattgtcttcgtagatatcagatctgatacattaaatattgatgagacattaattgaagatgccgttactcccgctactaaagcaatagttcctgttcactatgctggtgtatcctgcgaaatggataccatattggatatagccaaacaccacaatcttaaagtgattgaagatgctgctcaaggatttggctcaacctataaagggagaccattaggtacaattggtgactttggatgttatagcttccacgaaaccaagaatctaagcatgggagaaggcggtgctattctttttcaggataatactttacaggaaaaagctgaaatattgcgggaaaaaggaactaatcgcagtaaattttttagaggtcagatcgataagtacacatggatggactatggttcgtcctatcttcccagtgatttaaacgcagcatatttatgggctcaattagaggcagtaaaaaccattcaggaggatcgaatggcatcctttcgtttttataatgataagttaaaaccacttgctcagagaggttattttgagcaacctgttatccctgagggtattgagcacaacgcacatatgtattatatcaaattaccagatttagaaactagaagcaaacttattacttatcttaagaaaaaaaatattctaagtgtattccattatgtacctttacactcatcccctgccggacaaaaatttggccgttttcacggcatcgatcgatataccacaaaagaaagtgaacgtcttttgcgtttacctatgtattatggtctaactcaggatacaaaggaatatattgtggatacgattgcttgctattttaccggccaatattaaatccaggggcaatgtcaagtattaatggttgcttacgggtaaaatgtagaaaggagtaatatgcctaaacattattgcatattttcagcacagtatcttcctcacattggcggaatagaaagatatacttatcatttagctaaagaattgcttaaaaacggtgattcagtaattgttattacatccaaaacagataacctgcctgattatgaaattatggacggcattccggtttaccgcctaccttgctggaacttattaaacggccgataccccatcataaagccccaaaaaaagttcctacagcttcacaggcacataaaaaatatccattttgacatgattataattaatgcccgattttatgttcactcactttatgctgctatattaggaaaagcaaaacatgttcacactatcattattgatcatggttccggtcacctgtccgtcgacaatcccttatttgaccgcataggaagtatttatgaacattgttttactagcgtactaaaactattttgtcacgaattttatggggtttctcaggcaagttgccgctggttacagcactttaatatagaagcaaaaggagaactctataatgctatagatcttcctcatattgaagcttgtctggcagacagttccatagattttcgtgaaaaatataatctacctgaagaatctacggtaattacctatactggacgcttaatacccgaaaaaggggtacttcagttagcagaggcttttgaacaattagccccatcgcatccaaatctttatctttttattgcaggggaaggagaacttgaagataccttaagaaactttaattcttctaacataaaaattacagggcgcctgacatttactgatattatttccctattaaaatcatctgatattttctgccttccttctgtttcagaaggtttttctacttcaatattagaagcagttgcctgccataattatattatagtctctgaaggcggctggcccaaggaattaattcttgataacacatatggtactatcctgcaagacacatctgcacaagcaatatatcaagctcttgtttatgcagcagaacaccctcttcttcgaattaaggcatcagaaaagacgtataaaatattaaaatcaaatttcacttgggaaataacagtaaataaattacgcaacttaacataagtgtgcaatagagagcagaaatcctgtgccttctcttcatccattagacgagcagcacaggatatttttatggtaatgtatatataataatacctaatacaatgataatgtttcctatcatctttcccctactaaccttttcttttaatatccctacagataataataaaacaaaaacatatgtaaaagcatcaatcactggaccatatttcatttctacttgtgtatacgcatatgtgtttataagtaatactgtaaaaaaaatactatacgcaactaatactctccagtttaaatactctaaaactgggtgcttataagttctattagcactttgttttaaaagtacttgagaaattgctgaaaaaaaagtacagacaaacataagtaacatatacattttattcataacgctgcaccaccaatactccaatgaatactataccaattcccaatatattagttgctgaaagctgttcatgaaaaattaacactgcccatatttgtgaccatattagatacacactcctattcgcatacgctgtggtaaggtcaaatttctttatcaccttttgccaggcaatcgcataaataaagcagttagtcagcatcaacatgatatataaatacagcttccaaccataaagaccgcttttattatactctatagaagctaatttagaaaaaatgctagtaaaagaaaacagcaagatattcaagtgtagcagaatatatttttttaccctcttcatattatcctccgtatacctattctgccccctaccccctgctgaccacagcatattattataattataacattctttagcttattcatcaaccttacagtgttatcggcacagctaaaaggcattgaccccatccccaaaaagtcgtataatgttttaaaatgtctttatgaagatatataaaaaggaggctattatgagtttatattcggtcgttgtaccagtatataattctgagcatacactggacgagctttacggacgtctccgcaaagttttcgatgaaacaatgaaagaaccctttgaactaattctggtagacgacagctccagagataattcctacgaaaaaatgcagatgcttcaccagaaagatccccgggttaaaattatacagatggctaagaatttcggtcagcaccccgcattgctttgtggtttccaatacgcaacaggagattatgttatcactatggatgatgatcttcagcaccccccggaagagataccgaaactggctgctgtgattaaggaacgctctgacgttgatgtcattattgcaaaatatgagggaagaaagcataatgttatccgccgtctcggtacccgcgtgtctgtgtatgcaacctctaaaatgcttaacaaagatccgaatctggaaatcaccagctttcggctgatgcggaaatttattgtagatgccatcctgcagatgaatgttagactgcctcagataggtaatcttttagtgcagacatccaatcggattatcaatgttacggttcatcacgacgagagaaagtacggcaagagcggttataccttccggagactaatgcgggatttgatttatgatattaccactcattccgcactgcccctgattattgtacgtgatattgggatcatcagcttttttgcaagtatacttctgggaattttctatctcgtccgatacttcgtgtacggtgtatccgtagaaggctttacgactcttgtacttttactggtagcgtattccggactatctttgcttgggatcggcgttattggacaatatctcatgaatatccttaatgaatcaagaaaaatgcctaactatattgagcgaaggaaggaattatgatggtactatgaaggaaatcggtggatatcttgaattagaagaactggctggggaagaatactataaagacatgtatcgcctgaatctgggcaggacggccctgctgtacctatgccggcttagggggtgcaaaaaacttttacttccctattttctgtgtgattcggtgataaagtcctgcagacatgccggaataaacttagaatattatcacatagacagtaatttaacacctcaggtgccggattccctggagtccggaacttatctttatctggtgaattactatggtcagcttacagatgaaactattctattttataagaagaaataccagcatattatcgttgatcatacccatgcatttttccaacgccctcttcctggagtagatactatatactcctgccgaaagttctttgggctccctgatggcgcttatctgtctacagacgcatccccagtacttcccctgcaccaagatctgtccggcagccgcatggaacatcttctgggacgatacgaaaaagatgctgcttcctattatagcaccatgttagacaatgcatcctcttttcagcaggagtctccgaagttaatgtcccgtcttactcagaacttattaaaaggcattgattatgagcgcgtcatagaacggcgggaaatcaactaccgtcgtctggataaatattttggggacaggaatccactgccttttcagatgcccaggggaccttttacttatcccttttattatcccaagggcataaaactcagaaaattaactgcatcctgtaagctttaccttccaacctattggaataacgtaattcagcatgcaacagctgaaagtgttgaatatgactatgcatctaatatccttccccttccctgtgatcaaagatataaccctcaggatatggatgcagtggctgacagattatatgctgcaatcaaagatttggagagaaaaaaatgagacatcggctgctaatattaggatccctgactgaattcgtgcttattacacgtatggctaaagaacgaggcatttttaccgtcgtatgcgatgctaatgagaatggacccgctaaagcgattgcagatcgcgcgtatcatattaatgttgaaaagacagatgagatagcagatatctgcaaaagggaaaagatagacgggataatcacttcattttctgatcgtctttttgagtgtatggtacaaattgctgccaaagcagaactaaaatgttatctaacccctgataaactggattattaccgaaataaaattattatgaaagatatgctcacacagctaaaaatcagtactcccagttaccgaagcctaagaccggatttccagattcaggatttagaggatatacaatttcctgtggtagcaaaacctgtggacaaatatggatcccggggaatcttcgtactgaatcatccagaagaaatccgccggtatttccatgagatatgtaaaacctctgaaatcaaagaaattctaatagaagaatacaatccaggctacgaatttaatatgatgtcctgggtattggatggaaaagtacatgtaatcagtattgctgaccgggaaaaaacagagatagcgcccggcagaattccaatcagcacccgtaacgtatatccatcccgcttaatggaagatgtatatgcagaagcgagctccatccttcaaaaggttgcgtcctatactcagcaaaaagagggggctctctctatgcagtttttctggaaacctggtgagccggttcaggtctgtgagatcgccggacgttttttcggctatgagcatgaattagtagaatacagcagtggtctatccatagaaaagcttctcttagactatgtctatgacgaaacttctcttagaagagacttgtctgcacactccccctggttctcccgctgcagtgctgtcttatattttcatggaagggaaactgacatcatggatgaaagtgaggctgtcagtctctccaaggaagaagatattgagaattctatccttttctacaaggaaggagaacgcatatcctcagaaaccccccgcccctatgtggctcggtattatttaaccggggatacacgggaagcagttgataagcgcacaaaagaaattttccacaaaatgacgatcaaaaataccgccggggaagaagttttgtatagaaatcgagtgccggagtatccggcggaataaaaaaaagcgaagcaatgcttcgctttttttatttctttctgttcagaatcagccgaataaccaccagaagaaccgtaaatactattaatccgcacagaaccagtattatcaacttcattgtattttgcgtatgttctttctttttattttgctccttctgtattctcttctgttcctcttgttgttctttctcaagagcctcctgttcttcctgtactttcacctgatcataggattctctggtcacggtcacacttccaaccgggtattcactgcacatataggtggtcagtaccttatcctgctgtacatcctcaagaacctccaattcagattcctccatcccggcaggaataatcccttgtcctccctgaatcacctcaccctttgctgtgaattccaaaaccttgaaattatcaaatccatagtccaaaactgtctttgtatccttgacaatctgggtcccatcccctttcatcagaacacataccaagagaagattatttctctccgcaaatgttaccagagtactttgggctgcgtctgtataaccagttttcccgcccagacatccctcatagtaccagtcgccttcatgaatcatagcatgatgattgtcaaatgtccttgccttaggatttttatttgtaggctctattgtataaacgactgttccaagtatctttctgaaggtttcattctgaatggcagcctgaccaatcaatgccaaatcatgagcggtggtatagtggctgtcatcgggaagaccattggcattattaaaatgggttcctgtacagcccaaatctgctgccttttgattcatcatattcacaaaattctctacacttccgcctacatattcagccacctgagttgttacctcattggctgatttcaacatcattgcatagagacattgttccatagtgagaacctctcccacctgcatgccgatattactgctccccggataagcatccttcaccccggtttccgtaaatgttacctgctcatccaagctgctgttctctagagccagcaaagcagtcattattttagtagtacttgcaggatacattctttcatccattgatttattgaataatacagtgcctgaagaggcatccatcagtattcctgtttcctctgcaatatccatagcctggggccagccagcaatcccattagtagtcacaacagatggatctgccggtgcaggaggtactgctgcagatgtgccttcacggctctcttccggctgttccccagcaggcacacccgtctcattgcccgcagtagctgtttccgttgcccatacctgaaccgggcatatattgccaaacacaattgcagccgataccgtacagactgttattgcaccaaatattcttttttttaatctcattctcttcacctcatacgcagattcttttctattatatgatatttttcggtatgccgcaagaatagagtagagaaatgtttcatcattcctattttgtggttagtttgactttccagcccccaccattctttaaaaatgtgaatccaaggtattcacaccttgtcagtctgactactttggtttttgatgcattcacttttaaaaacagttttctttctatccaatttgttatggattttattactctgttgactgccatttcactttttgtgaacaccattgtatcatcagtatatcaaccgtcacatcgtctcccctgcctgcccctttattggcgcagactctcttgtaagcagcgtttaggttgtctttagatagtatcttttccaacggttctgacattgttttgtgtgctttctcctttccattttcatggattcgccctaggtagcgcagtatccgcccatttccgtttcgcccttcctgctcgtctacttgcccgatttacgcacatgggttacggttgccttttggacttcgctgtcttgggccagcttaaccgccatgtgtgccttatatcagatttctgttcgtcaggctacgtttacgctatcccttcttctcgcccacacctcacggcgtaaaccttgggagtcgctttggggttcgtcggcaacttcgccccttgtggactttcaccacagactgacggcatgcccgtcatacccataaaaaggccgcagcctgactgctgcagccctcttgttccatgagaattctctgttttgcttcctactccttaatatgttaaaacatactgctttttcttctgtatcgcccgtttcatccggtctatgccataggagccgaaatcctctccccgggcctcctttaatatagtccaggcactccacaatacatcctgacatattttaaaaatagcgatcttttcctttgaaatttcatccggctgtttttggaaataatgctccagaaagagctcctcttccagtggtttaaaatcacactccgccaagtgggctgccaaatcccacatagggtcattatatccagcgtattcccagtcaataaggtacattttcccatttttatccttaataaagttttctgctaccaaatcgttatggcagggtttcagcactgtaccaagtttttccagccgctccaaaagttcatagaaaaatttatccacagcctcaaacccatcataatagactccgtttgcttcatggatttgtttcttatatttttcatattcttctttcacactaaaagtgccatacatctttatatgtgattcatgaagttctctcagaatagccgtagttttcttcatattcatctctaatcgtgccgtctttccatttagcgtttctgcctgtgggatgcattctgtaatcttaattccagtttccacattacagtacaccgtaggaggattaattcccagagctgatgctaaggccgcattatgctgctcactctttctgtcaatcattacatctgtcccagcaccaggcattcgcagaatataacgtttgccctgcactttcacaaaaaagttggtattggtcatacctccgcctatgctgcattcctctatatcctcatcctttacagacatacacacttttaatgtttctctggcatggttttcttttcgaagcctttctctctttttaattctggggtacactaatttctctgccttacggtaaagctggtcgttttcgattacagtccatgccatatcatcagccatcacccctgtaatctgataaatgcggccaatattctcaagaacatattcatagttcagcaaagggttctgattatccttgaagtactccagcatcttttcaaataaagcatacgatatcttactgacgcctaccaactcggcatcaatatgattcatctgcttgatatcttttgagattctaaatatcgtattgtccggatttagttctacatacgcctcatcattagaatcgctgggatttgtaagaagaacacaatttctgtcaggacattccagtaatttggagatagcagtctcctcaaatatctgattggcatctaccaaaagaaaatcctcttttatgaattctttcaccgtactcagtgatgccatagttccggtccatttatacctgtcgtttactaccaaatggacattcctgcggtttttaaagtaatttctatactcatctttctgatatccagcaacaatataataattctctattccatgcagagacagatttctcatgatcagttcaataactggcagtccgtcaatggtgagaagtccgattggctttgtaaagcacagatttataccagcggctaaaattacagcagtttttacaggagttcctttttcgccagagtctaatttcagcttttctatctgcttattttcaagactgtcctcaagaaaccttcttcctttttccgtaagaccataaactttatccttttcgatcaaatactcttcccggactaattcctttaaagaggcattaatattaccaaccgacatgctgcaagctttggctaaagctctttgagttagataacctaatttattaatatgataaagaatactataatatttgttcaaaataagcctcctttgtcaatagttcattgtttgaactattgtgattatatctaatgaacagaactttgtcaataaaaaagacagcctatagctgtcttttttatcgtattagattgccggatcagtaggatcccaattctgtgaacctggtattttttgtgctacaggtttgtcaaaaggtcctggtgaactggagtcataaatttgtaccttcatctttaatggacaattatcataaatccattttgcatctctgaccgtcatacgtacacagccgtgagacgctggtgatcctaatctgttatactctgctgccggcaggttatagcttgttgtattatatccagcaactgaatggaagagaattccccctacaattcttgtacagtattgtccgtaagacggacccataagggttccccaacgcatcttttggctcgtatagaaagttcctgtaggggtaggagttgcagacaatccaacagaacacacaaacgaaactactggtatggtatatcctgcacctccatcttgtgcatagattgtaatacagcatttctgcctgttaacttttgccatataagggccttttaccatactgcggacatcctgaaccatagctccgctattattaaaataaaacttataacttccaacatagttccagcctgtcaacatatagcctgcagcatccatataataccattttttattatctcgaacccatgcatctttaatcaaggttccatctggccttctaaactgccatctgttgccgttatatacccagcttccctgtgtttgatatgtcgaattaacagttccatatcctgttacctttttcccattctcatcgacgaaatagctgccaatccagcgatttgtggccataacaccattaccatccacataatattcacccacccaagtgtttgcagccattgcaccattactataaagataataccagacgctacctggtttaatccaaccggtcttcatagcaccactactgtccatataataccatttaccaccaactatctgccaaccagttttcattactcctttattgtccatgtaataccatttactgcgtataaactgccaaccggttttcatggctccactattatccatatagtaccagtcaccatcaattttctgccagtcagtcatcatggctccactattattcatgtaataccattttcgcccaatccactgccaaccagtcttcatggctccactgccatcaaaataataccattttcctccgataagctgccaatttgtcttcatggctccgctattgtctaggtagtaccatgtatttcccaacagaagccagttagtaagcatttttccctcgtcatccatataataccacttaccactaacatatacccatcctgtcgcttttgctccactgctctttaaatagtaccatgttcccgattcaatataccatcctgttctcatgtatccctccttatcgaaggcatacattactccatctatttcaatccattcgtcagcaggaaaaccgccatcttcataccgataccaccatcctctagaattctttatccatttaggtttatcgggcacatattccttaataaccttccccgtctcatccgttatgtacttaacaccatcaatcagctcgccttccggcttcgtctgtataggtgtaccatcttcatctaagtaatacttatcttcgccaatcgtctgaatcccgaagcgtttttctaagataccatccttattaaaatatagcttctttccttcgatctctttccaggcatctgtggcaagagtaaagtcatcattcacaaatacgtttttcagtgttgccggaccggttccatcatcataggaaatctccgtctgaaaaccaacttttccagtctcctgttttccatccgctccaaagtagcagtaaattgctttttcatctgcgttctgtgtcttaacccaggtattgcaggcaattttaccgtccggtgttacaaagtaatataccggttttgaaacctctccctctttctcaaagccgattgctacatatccctgaaattctgcgggcagttcaggaagcttctcgccggatggctgaccctcctgatactcataaacattccactgatcaagcacgtcaggtttgtcgctgtcacttgcctccagtttaaacaaatacttaggagccgctttgtctccctctttcactgcccatatccatccgctgtctgcctgattccatccctcggcatacgatacagttttgtaattgtcactctgctgtgtacccagttctgtaggtacatctcctgcagttgctcccaccggtaccgggggtactaacatcgttgcactcagcaataacgccagcagccgcattcttcttttcttcatttatacgtcctcctcatgcaataattctattaacaccgctgataaaaatcgggtactttttatcctgcagcctatagtataagggaatactatattaatagatatatataatttaccacttttttcttcaaaatacaaccaattcactccaagaaacagtcttgcagttattaagttttcattaagcaatgtaacaaaaaagccttattttatcaaggttttttagaaccgctaaatgttcaatttttgaatttattacttgacaagcgcagcggtttcctctacaatgcatggtgataatccgttctaaatttacaataatacagatacaggaggaagttctcttgacaaaagaaacgtttaatgaattatatagaaaaaaggagttttccgggctggccccttacaaagttgaaaatgctgtcataatggccgcagggttttcatccagatttgccccactatctgaagtctgccccaaagcattatttccagttaagggagaggtattaattgagcggcagatacggcagcttcgggacgctggaatacaagatatctatgttgttgtggggcacaagaaagagttattctattatttgaaagaaaaattcggcgtatttattgtggaaaataaggaatatcagtctcgtaataataattctacactttatgctgtcagagattatctgggaagcagttatatctgctcttctgataattactttaccgagaatgtctttcatccgtacgagtaccagccctattactcatgtctctatgcagagggggagacttcagagtactgcctgactgcagatgaaaataacagaattatccatgtaacagtaggtgggactgattcctggtatatgtttggtcatgtgtatgtaaaccaagaattctcgagaaaatatatctcctatttaacagaggaatacgatctgccggagatacgccaggcttattgggaggaaatctatatgaggcatttagattcccttacattgtatcagaaaccttttcagcccggtaccatccaggagtttgattccctggaagatctgagagcttttgattccttctatggcacccattcccaggaggaacttcttctatttttatccaacagcctattaagaacctaaagcaaattctaaacacaaaaaaagtacgggctggagaattagtcaagatgactaattctccagcccgtactttttcataatgcctctattctcccagaccgccctctatggcatctacgagtgttttcaaagcttcttcctcatcttctccctcgcaaaccagttctatctcatccccgcactttacacatgctcccagaacgctgaggacactttttgcattggctgtgctgttccggaaactgaacgtgattaaggatttgaatttcattgcttccttgcaaaggatgccagccggtctcaaatgtaatcctgttgggtttttaatcgttaccttttgacttaacatatgcatttctcccctatccgtctgatttttcagctgctgttttaacaagctgtagtttaaccgttatctcatctactacctgatactgactaggaacctgaattgtcagtggcacttcgtactctccgggtgaataaccgctcagatccaaggtagccgcaatgcttgattcgctgaaattagccaaatccttctttcttcccttcagccggatagtaaccttctcactgtcaaataccacatccatatctccaggttttatcacctggatgctggtagtcggaatactgaattcctgactgcccagcggcagtatcttcactttcagcaatattattttattttcattggttgccagaataatatcttccggcaacagtttgctgatatcaacctttacctcaaagtcagcagactctccgtccagctgcacttcatccgcaggaatcttaagtacattgccattatcggcaaattcctgaagtgcctcctctgtaccagcaatagtgattgtctctggaactgattcaatgacatcgacctggtatcctgaggcaggctttccgctgtaatcagcctctatggctatattgcttttggtcttccacagctctacagcaacatttaccgttgaagattggtcgtctgcaaatttaagactctttacatcgctctcagacatttcatcctggtttttgtctatgattttaatcgttgacggtataatggtatcttcattcaatccctccacgctgataggagccactaccttgtctatctttcccataacagatgccggacctttgatggtgatcttgtcgggatcactggtcatacgcccaagctcatatcccttcccgggcttgctgctgcctgcatccggtgttacaataaaatccatacttttaatctggtcaatctctatctctatgttctgaggtctggcctgaatatggtcctctgtgattccagggcaggatacggttataggaaccataatgggatcggaatccatatctacaatctgctgcagatctgcaaccgcggtaatatcctttgcttccagcctgtcaaccactgatcgcttaccggttacagagacactgatatttctcttcgcctcgtccaccagcggcatcttccccatactctcaatataggttgaatttgtaatctccacagatacattggaaatggtctgtgtcatcaccggatcctcaatatttacaaccaaaagccatacaaacacagcaatgaatacggatataattttcaaggtgaatttattcatcagacttttcttcatgcttcacccttcctttccatatcctgaacttggaagtatcagtttttacttttttctgtaccttctccaatacctcccttaattcgtctggcgtcaagcctaccttcagacttccgctcatggcaacagaaacccggccggtctcctcagatacaatgatggtgagcgaatctgtcacctcactgatccccacaccagctctgtggcgggttcccagatccttactgagattcatgttatccgatagaggcagataacaggtagcagccacaatccggtcacctctcactatgatggccccgtcatgaagaggggtattatgttcaaaaatattcagcagcaattggctggtcaataaagagtccagcataattcccgtctttgcatactcattgagcaaaatatcctgctcaattacaatcagagcaccagtcttaacttctcccatatcaaagcatgcccggataatttcattaatcgtcttgttggaaaaccttccttcttcctctttattggcatcgaagggaaggattgtggagacaatgtttttatgtcccaattcttccaatgctttacgcaattccggctgaaaaataatcagaatcgctgtaatagcaaaaccaacactgttcttggcaatccaaaggattgtctgcatgtcaaataaataagcaataaaaataaatgccagtacaaccagcataccttttaacagattatacgctctggtatttttgacccacagcataaattcatatacaagaacagagatgattaagatttcaactatatctatcacatggatcttggggagtgaaaggttaaccagatagctcttaattagatttataatattttccataccttcactcctttctgccagtcccgaagttttgtcttacaaatcttttaaagaatcctccagcttttcttcaaaatcaaattctgaaaaatcaactttctccagtggaatatcctcctcttcatccggctcccgggaagcatttctccgctcaggcctttcctccggctctacctggatcttcttaatgcttcttttggattgtgttaccagagatttcggaaccgcctttacatagtatacatattcgtcgtcttcaaactggagattctcgcttctggagtagtccactcccaagacaaaaaactccaatatcaagccaaggatacaagatcccacggctgaaatgataacagcagccatttcattagtcacatccaggaaaaggcccccggccaccattgtcacaatataaataacagcacctacaacgatagcaattctccaggaatagtccactgccatcttacggataacatatactagtattataaccgctgtaaaagcaagcacggtcagccacatattctggtttttcactaaaccgtccagcagaaacttcagcttctgcataatatctgtctcgcctttcagtacagatgctttctcttttaccaaattcataaagtagtagataatcacaccacagtctgcagaaatagcagacgcaggcccacggagcagaccgcagccaatggggacaatggccggtaccctgagtccgaatgctacaggtgtcaggatcaaagccaaattatccttagaagaaaagcgaagaaataatatcatcagcaatataataagaagaagcgcaaatccagccacttcgacccctacagcatagcagtgggcaacaatgagggccaggcctaaaattaccatcaagttcaggggaagcactgaacacaggatcgacaaaattaatacgacaaagatattgtccagcttatgcataaatcccagggaagcatttattcccctgaaggtaataatcgccaataaaaactttaagacaggaagaataaaggtatcatgctcaccgtaaaaattcttcatcttttgtttcagttccagtaaagctgtcatgctctcttcctcctgacagtattcttcttgaaatttttcttctcttccctatcgtacattttcttaagcttattcagatctatgtaatactgctgaatactcttctttgccctgctgtacttcacagaggtataaatatacgttacaacggaatagaaaaccagtaataccacgtatcctgcgataacagcaatgacagtggtaactacattcagcttatgggcattattcagaagatattctgcattataacccgcaataacagccaggatcatacagtacccaatagataccagaaaaaaattcttaatcaatgccagcccaataaaatcactgcggtagtatttactgataggcagatatgtcttcccctcgccggcttcataagaagcaagcttagtcatttgtctgattcgctccaaatctaacataaaatactccttatcaggtacataatttgaagaagtaagccatctacccctccatttactcatacgtactttattatagcatatatctttttctaagaaaaggactttttagggcccctttcccccacaaattgtcataaaataaactttttttacaccatttttctttaatattttactcatattgtctattgtgcttcctgttgtgtaaatatcatctacgatgagaactttcttccagggaagccggctatcacacagatacaacggattaatcttaaatgcttttcccagatttttccttctctctgcggggtccagctttttctgcggagcagtttccagtatcctgagaactgcgtctttcctcatgggaataccggtgtaatgctccagccatgttcccacttcctccgcctgattatatcccctctttttccttctatttttatgtaccggcaccggaaggattacatctggattccataatttcagctgcctgccctgataatgcaccattgcccatgcataataatgggcgtattcacgccttccgtgatatttaaatttgaggattgattctttcataattgtttcgtaggaaaaaataccaagaccttggtcaaagtgatgtgttttttgagtacagtcaagacagaattccgactgctcattcataagttttttaccacagcttttgcagcgcggctcttcaataggcgtcacagcctgccggcacccggtgcataaaagacttcctttcggcattacaatatcatggcagatcggacagcggcggggatacaggcaatccaccgctgcccttgcatattttttaatctgtatcaccagcctcccctttctgcttcctgtatgcgaagatccagtgtagtgtatctgctctgttccatctcattatctatcatttcttcaaatgttctctcatcaccaaccagggtgacgcactttctggcacgagttacagcggtatagagcaagttccttgtcatcagcatctttggccctcctaacagagggataataactgccgggtactcacttccctgggatttgtgaatggtaacggcataggccagctccagttcatccaactgggaaaatgcatattccacatacctgcattcgtcatattccacagtgagcgtttccccaaaggaattaatttctttaacgatacccatatcaccgttaaatactccctctccccgttctgcagcaatcccgtatcttccccgtatttcccagggcagctggtaattgtttttaatctgcatgaccttgtccccttcccggaaaagtccctgaccttgctctctttcctttttttcgggagcaggaggattcagatactgctgcaaaatctgattcagacgttccacacccaaaagtcccttcctcataggagacaaaacctggatatccaaaggatctgcatctacaaactttggcagcttcttttgtatcagcgttataataacactgattataatatttgcatcataccttttcaggaagaaaaagtccatgcttttattgtccagcagaactctctccccccggttaatcttatgggcattcaccacaatatcgctctgggttgcctgccgaaaaattttagtcagctcgaccacatgaaagttttcggatgcaataatatccttcagtacactgccgggtcctacactgggcagctgattaacgtcccccacaagaacaagccgggtcccaactgtcaccgcagacaaaagtgcatgcatcagatgaatatcaaccatagacatctcatcgataatgatcacatctgcatccagaggattctcctcattccgttcaaaatgtgcccctgcggaggaatcttccgggactccggttagttccagaagtctatgtatggtccgtgcttcatatccggttgcctccgtcattcgttttgcagcacgtcctgtgggagccgccaggaatatatcttgtccttctccctcaaaatatctgatgatagcatttatagtagttgttttacctgttccggggccgcctgtgataactagtaccccccatcgaactgcctcttttactgcctccctctgccgctcatccaagatcacgtcgtggttagcctctatcctccgcagctgcttttccagcagcgtctcatctacatcctcctggatgttcaattctcgaagcatctgagcggtatggagttccagatggtaaaactgactggcatagaccacaggaagtggaacctctgatttttcatctgttatctcttttacaaccacctttcgatccaccgccaaatccatcacatgcttttccatatatgctgcctccactcccagaagctgagaagtacggcgcagcagcacctctttaggcagataggtatggccgtcaaaagttccctgcagcagtatatacagcagcccgcttcgtatccggtaatcagagtctgtatgaattccgatccttccggcaatctcatctgccatcttaaatcccaccccggagatatcctctgccatacggtacggattctctttcagaaccccatatagctgtgggccatactgctgataaattttaacgcctaaagaaagagagatgccgtactgctggagaaaaatcatagctttgcgcatatcagccttctcctccatctgctctgctatctcccgtgcttttcttggactaattccctttatctccgccaggcgttccggctcctcctctgcaattctgagagtatcatccccgaatcttctcacaattctggatgcaagcgctgctccgatgccctttatggcacctgaacccagatagcgctccatggccgccgcatcctggggtatcacagtttcaaaagaggtaattgtgaactgcgctccataagagggatgctccgtgaaacgcccctccgccttgatggtttctccctccccaatatactggaaattacctacacaggtaacctcttctcctccggagactaaacacatgactgtatatccattttcctcatttctgaaaataatatggtcaatataaccttctatggtctcttctacactcaattgccttattcctctttttctaaagtgtcttatccatcttgctcatcagctccatgtattccccggtaccaatggcaacagccagtgtaggctcctcagccaccaccgtatttattccggtttcttcctcaattaactgttccagacctcccagcagcgccccgccgccagtaagaacaatccctctgtcggccacatctgccgccaactccggaggagtcttctccagcacactgtgaatcgtctccataatctggctggtggcatcttttaatgcctcccgtatctcttccgaggtaagtgccactgttttcggaagtccggtaatagtatttcgtcctttgatctccatgacttttggctgaggcataggatatacgcttcctatctttacttttacattctccgctgtaggctcaccaatcatcaggttatgtttctttctcacataacgcataatggcatcgtcaaaattatctcctgctactttaatagacgttgccacaacagtacccccaagggagattactgccacgtctgtggtacctcctccaatatctactatcatgttcccaaagggtctggtaatgtcaatccctgcaccgatggctgcagcaattggctcttcgataatagccacctctctggcacctgcctgataagtagcctcctccactgcctttttctccacagctgtgacgccgcttgggacgcagatactaattctcggctttctgaatgcttttcttcccatggctttggaaataaaatacttcagcatcttctctgttacttcaaaatcagagataactccctgacgaagggggcggactgcaacgatgttcccgggagttctcccaatcatcatccgggcttcttccccaactgccctgattttattcgtatctttatcatatgctacgacggatggttccttcagcacaatcccttttccttttgcatacaccagaatactggctgttcccagatcaattccaatatctgttgatgtcatatgatacccctttctataactcctctgctcagactttttgtcctttgtgaagacagaccagactgatggtcaccagcctggtcatctatgatttattatatccaacttgtcctgaaaagaaaagggctaattactgcaaatattttgccacatattgtcctgtataagatgccgggttccgggctacttcttcgggagttccctgggtaataatagttccccctttgtctcctccttccggaccgatgtctatgatataatccgccgtcttaatcacatccagattatgttctatcacaatcaccgtgttgccaccctccgacagacgtttcaatatgtcaattagcttatgaacatctgcgaaatgcagacctgtcgtaggctcatccaaaatatagatggtctttcctgtacttctcttactcagctctgtggccagttttattcgctgggcttcacctcccgataaggtggtcgaaggctgtcccagacgaatataggatagtcccacatcatacagtgtttcaatctttcttctgatagaaggcagatgttcaaaaaacttcatagcctcttctactgtcatatccagtacgtcgtaaatacttttccctttgtattttacctccaaagtctctctgttatacctttttccctgacatacttcacagggaacgtagacatccggcaaaaaatgcatttcaatttttataatgccgtctccgctgcatgcctcacatcggccgcccttaacattaaaactgaaccttccctttttatacccccttgctttggcatccgccgtagaggcaaacagatcgcgtatctggtcaaacacacccgtataagtggcaggattagaacgtggggttcttcctatgggagactgatcgatatcaatgaccttgtccagctgttcaatccccgtaatgtccttatgtctgcccggaatggttcttgcccgattcagcttcctggccagggctttatatagaatttcattgacaagcgagctttttccggatccggatacccctgttacgcaggtcattatcccaagaggaaaactcacgtcaatatttttcagattattctcagctgccccatggatagtgagaaaacctgccggctgatttctgacctcaggaacaggaatttttatacggccgctgagataggcacctgtgaccgaatttttattcttcataagctcttttgccgtacctatacctactaactcaccaccatgctcaccggctccgggtccgatatctaccacacaatcagcagccagcatagtatcctcatcgtgctccaccacaatcagactgtttcccaaatcccgcagctgtttcaaagtattcaggagtttatcgttatcccgctgatgcagcccaatgctgggttcatccaggatataggcaactcctaccaatcctgatccaatctgagtagctagacgtatcctctgagcttccccaccggacagagtgccggtagcccgggacaaagatagatactccagccccacatccaaaaggaaccctactcttgcccttatctccttcagaatctgatttcctatcatctcctgtgtaggcgtaagattaagaccggaaaggtactcatttaaatttgttatagacagagatgtaatctcataaatattcttatctccaaccgttactgccagagcctcttttttcagacgctgaccccggcaggtctgacacggagtgatcctcataaaggactcatactcctgctttgtgtactctgagccggtttcccgataccgcctctcaacatttcgaataagaccttcaaaagctacatcgtatataccttctcctctctgccccttatagtacacttttacttctcttccatttgtaccgttaataattatgtccttaatatgatccggatactcctggaacggtgtatccaggctgaacttatattcttttgccagggcatccagtatagcccgggtatagcttgatttgtctgtacaggactgccatcccattactgcaattgcaccctccgcaatgcttaggcttttatccggaatcatgaggtcaatgtcaaattccatcttatatcccagtccgtaacaggaaggacaggcaccaaatggattgttaaaagaaaaaatcctgggttcaatctcgtcaatgctgatcccgcagtcaggacaggcaaagctctggctaaaattcatggcagttccatccataagatccaccaccagctttccctctgcaagctccagcacactctctattgaatctgtcagcctcttttgaatcccatcttttactacaagtctgtccactacaatttctatattgtgcttaatatttttatccagcgagatctcttcagaaagttcataaagactgccgtccacctggacgcgcacatatccgctttttctcgcctgctcgaaaagcttggcatgggttcctttccgtcccctgaccacaggtgccaaaagctgtatctttgttctctccggaagctccataatatggtccaccatctgatctacagtctgctttttgatctcttttccgcatttgggacaatggggaatcccaatcctggcatataaaagccgaaagtaatcataaatctccgtcacagttcccacggtagatctgggattcctgttcgtagatttctgatcgatagaaatggcaggaggcagaccttctatactctccacattaggcttttccatctgcccgagaaactgcctggcataagaagacagagactccatataacgcctctgcccttccgcataaatcgtatcaaacgccaaagaagatttcccagacccgctgagccccgtaagaactaccaattcattccttggaatatccacgctgagattttttagattattctcattggctccccgtattcttataaattgttttcctttatttctcgcagccatagtatctcctcatctattgtaatacattattcttatagtgtatcacaaccgtatctatattgcaaacatttgttcgttttgttccttttactgcttcgctgtaatactaacaatagaagttcctcttgtcaatataatgttggacttttattgtccaatttattaaattatagttttgtgtatgtaaagttcgagataaaatagtcggcgagcggagtgtcgcagacggacggtcaagggaggaggtcttggggccaggggtactgtgtggatctgcttgctactgcgtttctcctctgctaactgcctggccgttcactaagaagctcaggaaagccttcgctcctaagtgaccgccggcagtggatcttcggacgcactccgtagtctgcgcagctccacacagtacccctggccccaagacctcctcccttgacctggcagagactcacttcacattcacggaaaacgggtggggaaggtcgaacgttgtacacttttcctctggtttcccactattgataactcgatgttttggataaatagccaaccccctggaacttccccatacccaggtgagaggaattctgcggcggcgggctggctggtttgggcgggagggaggcttaagttccggggacgattccgcaggagtgactagagagtcttaggcaaaaccgggattcccgctggaaattttttcggcagtcagggccgaaaaaaagtgagcatgggcagagaatgcacatcaagcattctttgcacatacgaacggtgctcctgcggggattccggttttgtcttagactctcttcgcgacggaggtgtccccggaacttaagccttcctcccgcccgaaccagccagcccgctgccgcgggattcctctcaccgtccccccgccacctcacactttccgacttgaatcactttaagctgaagtccaagccctacactcctaaatcccaattatacaccgcaaacaaaaaagaaacccaaaaaagcaaagtcacccccttgccttcccaggttcccacatcttctatctacttatccatcttccgatagcaatattgtatcaaatcttttctcgtaataataccaataaaattattctgatcatccaccacaggcacaaaattctggttcatggccttgtcgatcaaatcttccatattacattcaatatgtaccggctgatagtccgtacggcgggggatttttgtgataggaatggtctcggccctcctcagattaagattctgctgatttttaatcccccacagcagatctccctctgtaatggtacccacgtatttcccgtcaatactaatcatagggatacaggaatatttgtggtattccattttctcaatcacctggcgtaaagtatcatcatcaaatacatatgctacatcttttttcggcgtgaggaaaaacaatatattcattctgtaacatctcctatttcttcgttcttagctattttacaacaaaaagtccgacattaccatattactgagtgagattccttctctggtaagaaatatccggccattttgggcctccagaagacctagtgaaagatatttatctatcggttgtttatagacatcctcaatgtttttgtgaaatgcgcgtgaaaagtcttgtctgccgatcccctcaatgaggcggaaccccaggaacataaattcttccatctgctccttttcacccagagtttctgtttggccgcgtatcttccatggttctgaactatgttctaaatacgctttccaatccgaagtattggaaaatcgaacctcccggatcagagacgctgcccctaagcccagtcccagataattttttcttttccagtatcctatattatggcggcaggcatatccgggctttgcataattggaaatctcgtactgaagatagccatattccctcagcagattataggtgagttcatacatagctctctcctcttcctccgggggtaaggtcagtttttgcctgtaaaaaggtgtcccctcttcgataatcagactgtacgcggaaatgtgctccggggcaagctttacagcctgcctgagattctcttcccacccctgcagggtctggtatggaattcctgacatcaaatctatatttatattagtaaatccggcatttcttgcctgctcatagttctcagcaaatacttcacaggtatgaatcctgcccaagcactttaaatctttattgttgaaggactggagccccatactcagtctgttaatccccatactgcgataggctctgagtttgtcccggttaagggttcccggattcgcctctatggtaatctctccaagtttctggataaaaaatgtctgcctgagactttccataatcctttccatctgtgacgtgttgagaatgctaggggtccctccccctaaaaatactgtagtcacctcatattccagggcaaattctctgtatgagcttatctctctgagaagagcttctacatatgcctctctctcagtctcatctccctgaaaagagagaaaatcacagtaactgcattttttcaggcaaaatggaatatgcagatacagttccaattcctgagtcatagctttacttatcatccagtttcagaacgctcataaaggccttctgagggatttccacattgcctatctgacgcatccttttctttccctccttctgtttttccagaagctttcttttacgggagatatcccccccatagcatttagccagaacatcctttcgcatagccttcactgtctctctggcaataatcttgctgccaatggctgcctggatcgggatttcaaagagctgtctgggtatctcctctttgagcttctcgcacattctgcggccccgttcataggcagtttccccgtgcacaataaaggacagggcatccacctcttccttattcaccaaaatatccagtttcaccaactcacttctctgatatcctgccatctcatagtcaaaggaggcataacctctagatcgtgattttaaggcatcaaaaaagtcgtagatgatttcgttcagaggaagaacgtattttagcagcgctctggtggtctccatatattccatcccctgatactggcccctgcgctcctgacatagatccataatcggcccgataaattctgtagtcaccattatctctgcatttacaaccggttcctccatataatcaatctcagagggatccggcaggttcgagggattcgttagctccataacatctccattggtcttatataccttataaataacgcctggcgccgttgtcaccaaatccagattatattccctttccaacctctcctgtatgatctccagatggagtagcccaagaaaaccgcagcgaaatccaaagcccagagctacggatgtctccggttcaaactgcagtgaagcatcatttaactgtagcttttccaaagcatctcttaaatcctggtattttgcaccgtctgcaggatacattccacagtaaaccatagggtttacctttttatatccgggaagggggtttgcacaaggcctgtccgcgtctgtaatcgtgtcacccacccgggtgtccttaacatttttaatactagctgtgatgtagcctaccatgcctgcactcagctcctcacagggaataaactggccggctccaaaatagccaacctcaactacttcttccactgcctgagtggccatcataagaattctagtccctttttttactatgccttccttaattcggcagaatacaataacgcccttataggcatcatagacagagtcaaaaatcagagcctgaagcggacttgccggatctccgttgggcgccggtatcttcttcacaatcttctccaaaaccgcttccacattggtacccatcttcgcagaaatcaagggagcatcctctgcctctatcccaatgacatcttcaatctcactgatgactctctccggatctgcactgggcagatcaattttgttaattacgggcatcacatccagatcatgatccagagcaaggtatacatttgccagcgtctgcgcttcaattccctgggcagcatctactacaaggattgcaccgtcacaggctgccaggctgcgcgaaacctcgtaattaaagtccacgtggccaggtgtgtcaataagattaaaaatatattcctccccatcctcagccttataaactgtccgcaccgtctgtgccttgatggtaatccctctctctctttccagatccatattatcaagcacctgtgcctgcatttctctatccgtaagcagtccggttttctctataatccgatccgccagcgttgattttccatggtcaatatgtgcaatgatgcaaaaatttctgattttactttggtcaattcctgccattgtacttcctcctaactgttatacagacagcaagaattacctgaccccaggtaattcctcccatctatccttgaccattgattataacacattaaatgcagacttgtcattcaccttttaatactttatttaaaatatccgccaaaggttccatagcgttctttacctctgcaacggtatttgtctgcgcaccacattctaccagcagtgacttcgggcgcatatgcaggttataacggtatcctttcagatagatacatctggtaaagtcgggatagtacttcttcgcctccagggacagctggagggataatgccagattatcctgaatatatggattgggcagggaagggatatctccgtttttagtagttctgctcagtccgttaaaaaacatgatctgtgcagtgggttttccattcacatccgtaaccagctttttcccctccgcaataccatccctgtgcaggtcaatcaccacttcaatactgggattttcttctaaaacctgctgaatcttatccccggcatagttgtaagccttgttcctgtccagcttgccgtccaccatgtcaaaaacatccgtcacatgaatcacattgtagtcatatttctggctgagcaggtcagtcaggtattcccccacccccacaacggttgtgcttgtgtctcctggcacagagtcagcaaaatcctcctgagaatggctgtggtatatcaggatctgaggtttgtcatttccggtctgcatacggaggtctttctgcaccagatcgggtgcattcagctgctcgctgttaattgttgtggtcttatcgatcacaaaaaagttattgattacataatcataatcctggaatttttccagagggatgtctgtgacaggggccctctcctgtatcccggacgcagaagtatcctctgtctcctgggtttcctccgcctctgccgcctggggcgcatcttcttccccttctcccaccggccctgcctcctggttctcttccagtattttagcctccaggaatccggagttttcagcaactattttgtcataggtggtactgctttctactgcagtctcatacgcattttcctgatccagataattaagaaaaggcacctgctccagtacccttcccatgatccactgggctgtcgcttcctcaggcgccctttcttccgtttccgtatataatagtcccggcatgtatacttctattgccttctcttctgcatctgccaaaaaacgttctgcaatcttcccgtctccatttagatattctgcctttatgatcaaagagccttttccaagaacatagcctcccaatgcgatcagtgccgttaaaaggagtacacggactgctttctgaatgattgtctctttctccactccatcacctcatatctatatatgaagttttgggacggattatactttagaaaatgcaatattaagcccttcggatatagtataggaaagtctcttcattgtttcgtccacatccttcggagtgacaaacatgctgtagagaggaggcgttatcatctcatccaggaattcctttttctccgcttcgtccaaggcatccagaagatgagccatagcatcgtatacaatagttgccgcatccactacggtaggtacaccgatgccaattaccattacccccagggtctccctggtaagtccatttctgtggttgcccacacctgagccgggatggattcccgtgtccgtaatctggatagtccggttcagccgttttgtacttctggccgccagagcatcgatagcgattactacatccggcttcgtctcatccacaacacccttgatgatttccagagtttccataccagtctgtgccattactcctggaacaagaccacttacacaatgagcctgatcttcccccatcccctgaacaccatattctctgataacatggcgggtaattctcagattggatattacttccggcccaaggcagtccggggtaatatcccggtttccaagccctaccaccaatacggtcagctctccctttccgggaatcagcttccggatatgctttgccaaaacctttgaaatttctctgtggtattcatcgtctggaaccgacatattgggagcctcaagtgtaatgtaggtgccctgcggccggcccatagcctttgccccgttttctgtctcaatttttaccgttgtggtacggatgtctttctcttcattataatcttcatcgatcacaaccccccgtatctctacattatcctcctcaaaccgctccgtagtctctaatgccaggtctgtgcgaatcctctgtgttcctatcatatcctgtctcctttgccataattgctttttactattttttacagtttttcatattttatgtattgacaatcaggagataataaactaaaataaatgagtatgttcgaattagggtgcccgtgtctgctctaatccaacaatgaatcaaaaagaataagcatatattggaggtgtacggtttggcaaatatcaaatctgctaagaaaagagtattagtaaacagaactaaagcagcaagaaataaatccattaaatcagcagttaaaacatccatcaaaaaggtagaagctgcagtagctgcaaaggacaaagaggcagcagcggctgctttgacagaagcaacagctacaattaataaggcagcatctaaaggtgtttatcataaaaacaactctgcaagaaaagtatcccgtttatcaaaagccgttaactcaatcgcttaagataaatatataaagaacccccactgttccgtcattcagtgaaggttctttttttattgccattttaatttccgctgaattttaccagcagcagttccacgctcatcacatcacctacccgaccggttttcacatcctcctcggccttaacgcactcttccacagtccttctaagctgctctgaggtatactgccttccgtaactcaggtaattgcgcaccacaaaaggctggagtccggtcttcctgccgattccctgattgtcataccccagtttctgcagctctttcacctgcaaaatcaaattaaactgccgggccagaagaaataaaatacgcataggaggttcttttagtgacagcaggtcatagtatagatccagggctttcttctgatttttctccgtaactgcccgaatcatgtcaaaaatcttgttggtcgtctgggtagtacagactgcctcaatatcgtcagccgtaatcacgttcctgtccatagtataacagagcagtttttctgcctcccgctcaatgtttcccatatcacttccggttttggatagaaacagttccatatctttttgagtaatgtttttcccctctttttttaatattccaagcacccagcgcatcaaagtcttgctgtcctgtatgccgaattccacaattctcccctgcttttttaccgccttatacatacgacttcttttatctatttcttcttctacaaagatcatgcacagatattcaggcagtccttcccctaagtaatcagccagttcctgacattggttcttaaaaaaccctgtattttggagaatgattactctccggtccgcaaaaaagggcatagtttctgccaaagcaatcacttccccaggaaccacctttttcccctcaaaataactgtaattcatagaatcatcttcaggcaaaagagctgccctcattttatttttatactgttgcttcagataggcttccggtccgcagaacagatacaccctgctaaagttctgatttttaatatcttcctgtaaacttttcatattcactcccactgtcatttctatggtctattatactgtctgtccctgtatttttcaattgtggttttatttccgtctaaaaacgcctgtacggcgccgccctcccaggtcataaatatgtggcttccggatttctccaggcgttccagagtctccttgtggggatgcccgtaagaatttcccaaaccgctggatatcaccgccgcctttggctttacagccttcagaaagctttccccggaggaattcctggagccgtggtgcgccaccttcaggatgtcataaggagaacacttatcctctcctaataatttttctaccttttgctcaccctccccctcgagatctcccgtaaagaggatccggcattctccgtaggaaacttcaataacctgggagccgctgtttgtctcctctccatagaatcccctgtccgggtgcagacaggatagatgcagcattccatcctccatagtatctccctgtgtcagacggaggatccggcatccagccgccttacccaatttttctaatttcttcagttccttatttgtatccttccatcccggcagaaccaagttccgtatcttcagagacgtctcctttccctctattgcctccagaagttccagtattccattcatatgatctgaatctgtatgtgaaaccataacatagtccagatactgaatgccctcgtattttagaaatggaagtatacggtaagtgcccacctttgcaatactgctgctccctccgtctatgagaaaggactgtcccagaggcgtctctatcactgcactgtctccctgccctacatccagaaaagtcaccttcagattttcatgatttctgttctgcataagaggaagtgcacataggagaaaaattgctgccgccagccaccttttacctttaatccttaacctgaggaagccccaggtctctcccttactatgcttccaggtcagcagcagcagtgctagaaatgcataatacatcacaatcttccagaaagcaggcctgcccagtatcagcgttatcccaggaatcccttgtatctgcctccctgctgtctgatatagagtcagcaagctcttagccggtaaaagcaggagtctccctgcatccgctgagataaaagccgccgtcatccctccggcgccggatataagaactgccgccacggtaggcagtacaaggagattaaaaaagaaaccaaataggggtacttcataaaaaaagtacaatactaccggagtacttatcatccagactgccaggccggataaaagatactgcgctgcgcggccagtcttttccttctgcatcaggggaagcaccaggccaattcccagcacagcgccgaatgacagcaagaagctgctgtcatagagatagcccgggctgtccattagaagcagaatacctgcgagactgagagcagagagcagatcgtaggtccttccaatccactttgccccggtaaccgcagcaaacataataaatgcccgcagtgtagaaacgcttcctccggtaagcagtccgtaacttaataaaacgaagacagaaatccctgccgacaagcccaaactgcctccggcttttcgcaataccttatagagtcccatgcccagaatggagagatggagacctgaaatcgacagaatatgggatattcccagcatctgaaattgtgactttatttctcggtccatgccgcttttctcacccaagagcatagcacataaaatagctcctgtacgttcatcggcaatgttctggaggttttctttcaaggtatttctaagtctgtacagtgcctctttatatacagaatagctctccccgggagactgaatctcctctccttccatggtatagtaaaccttccgggctctgtaataggctctttcgttaaattgtcctggattggaaggcagatctgtttccttcagaatgcctctggctcccagaagacttcccataggatatagggcttccccttcctctggtttatatgtaacttttacttgttcaatgggatataattcagattgatacgtcagaacgacgttttttagataatagatatagacagaatctctttcttccttttggtacagttcccccgtaattaccgcccattctccggattccagacagctgcgtactcccggggtacgggaggactctctgcatccagagagtccacttatatcacacagccagatgacagccataaacaaaaggcatatcacacagagcggccgctttatcatggtgatgcctcctcgactaatgagtaatcactgctgaaaaactgatccagatctacactttcacggaatgttttcttcgtctccccgttgacggatatctgtacctttgtaacatggcaggcatccaccagggagtttacaatggaatagattggtatactctcctgcactgtcaatgtctgatccagaaatgtcttgtccagattaacatagccaatcccctcagatatagataccccaagtatcttagtatccggagacagtgtgggataagttccgtcctggcggggtcccttaataagctgctggactaccaccttctccagaggtacgttgctgctgtagtatacctttacctgctcctttttcagtctgtctccggtttcattggtaaagtagagatccagggtagtaaacagataggaatttatattcttgccttcattttccacaaaggtatctccatccatagttcccaaaggattcccgctgttatccgcagcaggttccccctcaatcagaaactgcacccctgtgacacccggaatctgtataaatgattttacgatccccgcccgggctaatatctcccgcgtgtttgataactcactgtattctttcgaaaaattcacagtcaggatggtgttctcaaaggtataatccttaagcttcacggacttgggaagaatacttttatacgtttcatctgtcacctcctcctgtaccagttccgccatctcctgtatcatactctccgtctttctctcttccggaacataattctttgtgacaatcccggtttcctcggcattgacatagtatttatgatactccgatgatttttccactgttttgttttcacagccgctcagaaggaaagccatgcctatgattatgaaatatttccactgttttttcaactcgttcacctcctaagaaatatgaatcagaggaatacgaacggagaatgtcgttccttctttttctttgctgtatacttttatggcgccccggtgcattacaatggcattccttgtaatagccagccccagtcctgtaccgccaatttctctggaatgagacttatccacccggtaaaatcgttcaaaaatacgatccagtgactcttccggaattcccataccggaatctgccacagtcacatagaaatatttatggtctgcgttgagggacacccttacccatccgtcttcaacattatatttgatcgcattctccaccagattagacagtgccagagtaagctttgtctcatcaatctccgcattcacaggacggaagctgtccagtatcaattctatattctttctggctgcaataggctgcaggcgttttagtatcacctccagcagatcattgatgttgaccagctctatatgaagctcagatgcctttttatccagcttcaccagttccagcaggtctgtaatgattttattttcccgatctatctccagagtgatatcctgcatgaattcctggtatagttctatgggtacattttcctgccctaccagggagtctgccagcaccttcatagaagtaagcggcgtcttcagctcatgggatacattagagacaaattcctgtctggactcatccagtactttcattcttcccagcatcttattaaacgcatttgtaattaattctgtctctgtataatccggaacagagatctcctcgtccagatatccgtctgtcagatcctctatggaacgggttactctcgcaaaaggctttaccagaattcctgccagaatatagccaaataccaggaccagaatacagatgaccagaaggagaagagcccccttctgctcaagtacatcaatgtttccctcaatctcactggtagaactgctgataagcatcacacccatcacctttttcgtctccagattctggatgggagaagtcagttcaatataagcgttcttgttatcgtagtgagtggtattattgccgttgaagcagtcaatcacttcctcggataacgcgtatttcccctcgtccagattatacgtatctttaataattttaaactcatcgttaatgaccagaatcctgccactgtaaacggtggacagcatagacatggcactgttgcttacctccgaatccgtgtgattcagataatcttcactggccagctgattgcacagaatatcgcactgatttttaacattgatgctgcgcagggacacagcccggttttcgtagctttttacaagtccgttttcaataatcacgctggggactataccgattacgaccaggataagcataatccggaatctgagacttttaaaaaatgtaaactttctttttaaattgattatggctatcgactcccctttactcagaacagccctgatgcagactgcttcagggccatccaaatacttgcctttttatgatacttggaaataatatcccacaccccatttggtatggacatatcttggttcacttggattttcttcgatcttctcacgaagtcttcggatatgtacatccacggttctgacatctccgggatattcatatccccacactatattcaaaagactttcccggctgtaaaccttgttaggattatgcaccagcagctcaagaacatcaaactctttggctgtaagattaatttccttaccgctgataaaaacacgtctgccctcacagtccagctttagttccccaaccgtaatcatttttgacttttcatcttcctgttcctgcttttttgtacgacgcatgattgctttaatccgggcttttacttccaaaatattaaagggttttgtaatataatcatccgcaccatactccagtcccagaatcttgtccatatcctcgcctttggcggttagcataactatagggacattagaaaactcacggatttgctgacatacctcaaggcccgtcagcttaggcagcataatatccagcaaaattatatcgtattcgttttcctttgccatattcaaagcttcttctccatcgtacgcgcactcgacactcataccatcctgttccaggctgaaacggattccctttacaatcagtttttcatcatcaacgactaatacctttttactcattattttctcctcgtattaaatggtaatcaaatccgcaattttctgaaaaaccttgccctttatccctgaaatctcctgcagctcctctatagaggtaaatctgccgtgagtttccctatactctatgatggatgaggcttttacttccccgattcccggaagcgtctgaagctcttctgcagtagctgtattcagattcacctttccatctcccaaagtattacccgggcgttcttcttcctggggaatttcttccccctgctctcttttttcctgtgcctcttctctggtgtagatccgaatctgcgttccatcttctatgacagctgcctgatttacatacgtttcgtcagcatcttccgtaaatcctcccgctgcactgacagcctcatagacacgcgctcccccattcagatgatacacacccggctggtttacagccccgcatatatagatacagatctcaggcggcttttcttctgcttcttttgattgttcttttgtctctgtctgggagttatcctgcccatcctctccccggacgccctcctcttcggcgtgtccaaactgcacttccggtgctttttgtccacaggcgcataatacctggcataacagccacaataataccaaaaagtatattggtaatattttatttcttaacatatgcacatctcctttacagcgtattccgctataaggtcccacatcatgcacagctacctttattgtagcgaatttgccaggtgattacaatacagaatcttaaatttgcgtttttatttctgccatttaaagagaacaatgcctccaatagcaatcagcatcccaaaaagctttctccattcaaaaggctgtttgtccacaccaaacatcccaaacagttcgatcacatatgcaattcccagctgagcaattacaatcagcatcgctgctttcgccggcccgagagaactcatactctgaattacggtaacagtaataaatgcaccaattacccctcccaacagaatgtatttgtgatccacctgggctaatgccatcaccttctcccttccggtaaagagccaggcccccacacataccacaaaagccgacagctgtacccaccctgtagatacccacaaactggtctgttttgtaagctctgtattaaatactccttgtacactcatcaaagccccagatataagcgcaactattataccccacatagatgcaacctccatttttttatatttttcttaggttgtgcaaaatcgtgaggtttattcgtaaattatagttttgtgtaatagttttgtgtatgtgaagttcggggttatgcagtcggggagggaggcgtttcagacggacggatatagaagggagcaccggggagacagggcccggcccctggcctggccctgtctccccggtgctcccttctatatcctgacagagactcacttcacattcgcggaaaacgggtggggaaggtcgaacgctgtacacttttcctcttgttttcctcttgttttccactattgataactagatgttttggataaatagcgaacccccttgaacttccccatacccaggtgagaggaatcccaaatcacaaactcatttccaaccttctcaccatctcgtccacatcctccatcccaatgacaagaggaggaacaaatcgcagcacatcagtccccgccgaaatgataatcagtccctgttccaatgccctgctgacaatctcgcccacgggacggccggtgactacgactccctgcatcaggccttttccccgcctttccgtgaagaaatcatatttttccaccagctcgtccagtttcttctccagatagggcgcaatttcatttacgtgttccacaattttctcttcccggaacacatcaaataccttgttcactgccgtgcaggcaaatggattgcctccgtaagtggtgccgtgatcgcccggaactaaggatgcatccgctgtctttttattcagcacaaaagcgcctaccggaacaccgcatcccagtgcttttgcacttgtcatgatatcaggttctataccgtaagactgataggcaaacatggatcccgttcttcccatcccgcactggatttcatccagaaccaggagtatatccttttcgtcgcagatggaccggatacctttcaggaactctggttctgcaggataaatcccgccttctccctgaacagtttccaggataattgcacaggtcctgtctgtaatctgcgcttttacactttccaaatcattgaaccgggcaaactttactccgccaatcagcggtttgaagggttcctggtaatgggtgttgcctgtcactgacaaggcccccagacttctgccgtggaaggagtgatgcatagcaatgatctcgtgatccgtccttccatcctttaggtatgcatattttctcgctgccttgatggcgccctcaatggcctcagtgccgctgttagtaaagaatactttactcagtccgctggcctcacacagtttgcctgctgcctcaatggcaggtacattataatataaattagaggtgtgaataagcttatctatctgtgcttttaacgcattattatatcccgtatgcccgtagccaagggcaaagactgcaatccctgctccaaaatccagatactccttaccttccacatcgtatagacggacgccttctcctctgtccagaaccgtctgaaaccggttgtaggtatgcaaaatcacctgttctgcctgctctatatatgtattattactcattaaaatacctgctttctccatcgcctaaaatagcggtaccaattcccctgtcagtaaagaactccagcagaagacaatgctcaatgcggccatccagaatatgcaccctggaaacgccctgtttaatagcatcaatacagttctgcagcttgggaagcattcccccgcccacatgaccggatgccagaaattcttctgcctcagctaccgtaagttcggagatcagcgtagactgatccaggggatccctgtataccccctctatatctgttaaaaaagccagcttctgggcgtgtaccgcagtggcaatggcacaggctgcatcatccgcattgatattataagattcgtagttatcgtccattccaatgggacagataactgggacaaaatcattttcaatcagagtatctatcaaatctgtatttacatttgtcacctcacctacgtagccaatatccttccccgcggacatttttttctttacggtaagagtattgccatctttcccgctgattccggccgccttcacccctacactctccatatactgaaccagatttttattcacctttcccaaaaccatctcagcgatttccatggtctttgtatctgtgactctcagcccattgacaaattcaggagtcatgccggagagttttacccatttactgatctccttgccgcctccgtgtacaatgattggcttaaatccaaccagcttcagaagcgccacatccttaatcacattctttttcagctcattgtctgtcatggcgctgccgccgtactttactacaatctttgcaccgttaaagtgctgaatatatggaagtgcctcaataagcacctgcgctttgtgcagccataattccatattgtccatgttacatatcctccctatctgtccttttgaccctgccatgcttccctctcttcccggccttacattttcatatgcaccgttcagaatctgccccaggtcaagatctgtagtctgcgttaatcttaatgtaatcataggtcaaatcacagccccatgcagtggcagaggcatctcccatttttacatcagcaatcgctgtaactgctttttctgagaggattctggttgcctcatcctcgctgtaatctaccgcaacgccgttttcaatgatctgaattctgccggctgaactttcaaaaaacaaatccaccttttccggatcaaactgcgcgccggagtaccccatggcacaaagaattcttccccagttggcatcatggccataaatcgccgcctttgtcaaactggaagtaacaattgatttgctcaatgtaaccgcctgttccttgctctgggcgcctgtcaccctgacctcaaacaatgcggtggcaccctccccgtctccggcgattgcctttgccagataggtattgacatagtcaagtgcctctttgaaggtttcataatcctgatttttttctttgatttccaggttgcaggcaagaccgtttgccattaacagtactgtatcattcgttgacgtatctccatctacagagatcatattataggtatcctttacactatcgctcaaagcctcctggagcagttccttgctgatctccacatcagtcataataaagctcagcattgtacacatattcggatgtatcataccggaacccttgcacattcccccaatggttactttttgaccgccgatctccacttccacggcaatctcctttttcacagtatctgttgtcaatatggactgggcagccagtgaacccgcctttctgcttggggaaagcagaggaaccatgtcctttactccctgtgccagaatatccatggggagctgtttccctatgactcccgtagaggcaaccagtacagcctctgcaggaatatggagtgcttcacccgccactgcagcagtttgtctgcagtatccatagccttcctcccctgtacaggcatttgctattccgctgttgcacaccactgcctgagcaaagggctcctcggccacaattttctgatcccattttaccggggctgccttcaccacattcgtagtaaatgtccccgcagctttgcagggtacaatgctgtaaatcatagccatatcttttgtattttcctttttaatgcctgctgcaaggccagccgcctgaaatccctgaggagcggttactcctccctcaaataccttcatgattcactcttcctttctcttgttgttctgtgctcttatggaaacatgggaaccaaatccagaccttcccattcttcaaatccaaatagcaggttcatattctgtaccgcctgaccggcagctccctttaccagattgtccagggcacccatcattataatacggttcgttctggcatctatcttaaagttgacatccacgtaattacttccttccacccacttcgtctgaggatatacctccttatccagtacccgcacaaatttttcccctgcataatacttgtcgtaagccgccttcacatcctcataagcggcgtccttctttagtcctgcataagcagtaaccagaattccccggttcatgggcaccagatgaggcgtaaaattaatcctaatttcttccccggccgcatatcccagctgctcttcaatctccggcgtatgacggtgggtagcgaccccatatgccttcatattttcattcacctcacagaaaaggttatctacctttgctcctcttcccgcaccggaggtaccggactttgcatctatgataatggtattgggatcaataatcccttcctttactaagggatacacagtgagaatactgcaggtagtatagcaccccggattagctaccagtctggccttctttaccttatctctgttaatttcacagagcccgtacaccgcctcctcgataaactgaggggatttatgttccagcttataccattcctcataggttgccacatccttaatccggaaatctgcactcagatctacaattttaactttttccagtatctcctcattgagcatagacgcacagaatccctggggtgtggcggtaaaaatcacatctacctgctctgccaaagcttccatattatcgtccatacatacatcatctacaatttgaaacatattccgataaacatcactgtattttttgtctatgtagcttctggatccataccatttgatctctgcctctttatgtccctgcagcagacgtaccagctctgaccccgcatagccggtagatccgatgattcctgctttaatcattaattttccctcatttctttctatattttacagcggtcctgattactcattcttaatgatataatacttccccgggcttttcaagatatgatattcagtttcccccggaattgctgcaagatctgctgctgttcactccgcccccggggacacgctgcccaatgcatacaaattgtatcctgccgctgcttcttttgagatttagctcggcataacacctcacagatctgccgtgtgaataagggcagctttctttttatttgcataattatacattatcactgtatattatgcaaccccttttctattttttcattaatatagaagcatccagctaaatttcctctgtttataaaggttcctggggataccggccacaaaaattttcatcatttttgctatttatacttgcataattataacaaatgatgtatattaaccattagtataaggcacgcacaaaagacggccgtataaatttaggaggatataagcatgaaagaaaaggtaattttagcatattccggcggactggataccacagcgatcattccctggttaaaagaaaactttgactatgatgtagtatgctgctgcatagactgcggacagggcaacgaattagacggactggacgaaagagccaagctttccggagcatccaagctttacatagaaaatgtaatagacgaattttgtgacgactatattgtaccatgcgtacaggccaactcagtctatgaaaataaatatttgctgggcacttccatggctcgtccagttatcgccaagcgtctggtggaaattgccagaaaagaaggcgcaactgccatctgtcacggagccaccggcaaaggaaacgatcagatccgttttgaacttggcatcaaggcgctggcccccgatcttaaaattatcgccccctggagaatgacagatgtctggactatgcagtcaagagaagacgaaattgagtactgtaagcagcacggcattgacctgcctttctccgcagacagcagctacagccgggaccgaaatctatggcacatcagccatgaaggtttagaacttgaggatcctgccaatgagcctaactatgaacatctgctggtacttggagttactcctgaacaagctcccgaagaaggagaatatgtaaccatgacctttgaaaaaggtgttcctgtgcgtttaaacggagaaagtctaaaagtttccgagatcatcaccaagctgaatgaactgggcggaaaacatggcattggaatcgtagacattgtagaaaaccgtgtggttggaatgaaatccagaggcgtctatgaaactccgggaggaactattctgatggaagctcatcagcagctggaggagcttgtattagaccgggcaactatggagactaaaaaggacctgggaaataaatttgcccagatcgtgtatgaaggtaaatggtttacacctcttcgcgaggctatccaggcatttgtagagtcaacacaggaatatgtaaccggtgaagttaaatttaagctttacaaaggaaatattatcaaagccggaaccacctcaccgtacagcctgtacagcgaatccttagcctccttcaccacaggcgagctatacgatcacaacgatgccagcggttttattaccctgtttggtcttcccttaaaagtgcgcgctatgaaaatggccgaggctgagaaaaataataaataattttgctaataaagaggtatgccgctcatcacgcggcatacctctttatttatccatctttcattctaacatctattctccacatatctctgaatattagatgcatttacatactttgtggcttctccctgacttaccaccaccaaagtgggagcctgcataattccatatttctgagcaagatccgggtgctgctccgcatcaataatcttaaactcttccccttccagcatctgtttcgctatccggcagttggggcaggtgcttgtggtaaacaataatttcttgtcatcagccactggtgtcacctccacagtttcctgggatatcttaaccagactcttatgggcaggcttcatctgggaatgagacacattgtatagttttctgtttttatattcctggctcttaccgtcattccagttttgaaccgggcgataatatccggtaatacggctgtatacctctgcggatttaccgcaggtggggcagataaagtgttcccctgcaatatacccgtgttccttgcacacagaatacgttggagacagtgtatagtaaggcagtttataattttccgcaatcttgcgcaccagcgatgccgctgctttccagtccggaagcttttctcccaggaaagcatggaatacggttccggaagtgtatagtgtctgaagttcatcctgaatatccagggcgtcgaatatatcttccgtatactcaacaggcaggtgagagctattggtatagtatggtgtatccccttcagcgcctgcggttttaatatccggccactgttctctgtcatgctttgccagacggtaagtagtggattctgccggagttgcctccagattgtagagttcaccgtattcctcctgataatcagaaagacggtttcgcatatagttcagcacttcttttgaaaatgcctgagtcttttcatctgtcatatcctgtcccagccattttgcattcagcccaacttcattcatgccaattaagccaatggtagagaaatgattgtcaaagctgcccagatacctcttggtatatggataaagtccctcgttcagaagctttgtgataaccgttctcttaatatggagggaacgtgcggatatatccatcatatgatccagatgcctgtagaattcttctgcagtattggagcggtatgccagccttggcatattaatggtaacaacacccacagagcctgtactttccccggagccgaagtatcccccggttttctttctgagctctctcagatcaagtctcagacggcagcacatgctgcgcacatcgctgggctccatatcactgttaatatagttggagaaatacggggttccgtatttggatgtcatttcaaacagcagacggttattttctgtatcagaccagtcaaagtcagaggtaatggaataggtcggaatgggatactggaagcccctgccgttggcgtcaccttcgatcatggtctcaataaatgctttgttgatcatatccatctcttttttacagtctttatacttaaaatccatctctattccgcctacaattgcgggaagctccgccaaatcgtcgggaactgtccagtccagtgtaatattggaaaacggcgcttgtgtcccccatcggctcggtgtattcactccatatataaaggattcaatacatttcttcacttgctggtagctcaggtcgtcggtctttacaaaaggcgccaggtaagtgtcaaaagaggagaatgcctgggctcctgcccattcgttctgcataatgccaaggaagttgaccatctgattgcagagcacgctcaagtgtttggcaggagcggatgttatctttccttcaattcctcccaggccttcctgaatcaattgtttcagagaccaccccgcgcagtagccggtaagcatagataagtcatgaatatgaatatcagcattgcggtgtgcctcagcaacctcatcgtcgtaaatctcagacagccagtaattagctgtgacagcaccggagttgctgagaatcagtcctcctacggaataggttactgtggagttttcttttaccctccagtcttctatcttaacatagctatttacaatatccttgtagtctacaatggtagatttcatattgcggactttttctctctgttttctgtaaagaatatatgcttttgccacttcagaatatccggtttggatcagaacattctcaacactgtcctggatatcttccaccgttatctggttgtctctgatctttttctgaaaatctgaggttacgcgcagtcctaataattccagcatatcatcgctgaaatgtttctcattagcagcaaaggcttttccgatggcacgggtaattttgttcatcttaaattctgctatttctccatctctttttactacctgaaacattgtatttcctcctcgatctatgtagtgttttcccttaattatcattccccggcacctgcttttgcttatctgttcccttccaaggcaggttcctgtacgtaacattgtatcagagacatatgggagagtcaagagcaaaaagcaccatatattgtgtctgcttttatgaagaaacaatatatggtgtaattttgactactattttctatcttctattttgtaaaagctgttgctgaacaagagatttttccgtaaatagcaaatactgccgaacatttactgccttcctccacctcagatctctgtcttcaaaaagttgtccgcatttacgaattaccctttactagttatggtattatttaccagtttctttgtgcaacattcacaatgcgcctaaatcttagggtaaatttccttggagacaaatgcctttacggaaatcccttccggaagatattcctcttctaacaactctcctccctgtctgataagctgaagaagccctgctttttcataaggatagagcctttcaatataaatctggccttctctgagaatctctgccagtacttctcttagctcctccaggccctgtcctgtttttgacgaggttagaatagaataatctgcccgaaaatcccggaagcctcccggtgcacacagtctgtcctgtttattgaacaatgtaactatgggcttattttctacctgcagctggcggagagtctcatacactacatgcatttgtgtatccatccggggattggaagcatccactacatgtataataatatccgcatacctggcttcctccagagtgctcttaaatgcctctatgaggtgatgaggcagcttttgtataaaacctacggtatctgtgagcaggatctcctgcttgccggaaagcttcagtgcccttgtggtggtatcaagtgtagagaacaacatctcatcctcatagatgccggcatcagtaagggcgttcagcatactgcttttcccagccgatgtataccccaccagtgctgccacctttttatgcgtctttgctctctgcttccttattagctcccggtgctgctttacatcctccagttcccgtttgagcaaaccaatccgagtgtggatcagccgtctgtccatctctaatttcttttctcccggccccctggttcctattccgcccccaaggcgtgacagcgaattgcgcagtcccaccagtcttgcagctctgtacctaagctgtgcaagctctacctgaatcttaccctcactgctggtagctctggcggcaaagatatctaaaatcagcaaagtcctgtccatgatcttacattccagactctgctccaaatttctcagctgcactgcagacaattcatcatcacagataattcctgtggcgtccagtgcataaacaagccccttcagctcctccagctttccttttcctacatatgtgacaggatgtatggcttccctgttctggattagcgtacctgccacctgtgccccggcggttctagcgagttctcccagttcctccagagattcctctgtattctccctgtcgttctcctgtactcccaccaggatgactctctcttcaatctgactcatatcgtataactgcatggtatagtcttattcttcctttcccttgggttttcatagatattattataagactttttcccaattgatattcccgctggcttttcattccctcactcagcgccttgagaaatcgttctgtaatcacaggctaccacaagtatagcagcctgtccacctttgattcccagttcaaatggcaaatatgaaaaagattgacaataaaatcagaaagctttatacttatcaatagtgcatttattagttggcgactcaactaataatttttttaatctatggaggtattatatggaaaacacacgtgcaccgcaggcagagaacaagatgggcgttatgcccgtacccaaactgcttcttaccatgtcactgccaatgattatttctatgttggtacaggctttatataatgttgtagacagtatgtttgtagcacaattgaatgagaatgctctgactgcggtatctttagcttttccggtacagaacttaatgatttctattctcaccggtacaggagtaggcattaacgcgcttctttccagaagccttggggaaaagaaaattgatcgggcaaataaagtagccaatcacggaattatcctcaccattatcagttttgttgtatttcttttaataggtatctttttttctaaattattttataccattcagacccaggatgcccagatagtatcatacggtacatcctatatgaaaatttgctgtattttttcctttggtatgtctcttcagataacctttgaacgtcttctgcagtccacaggaaaaaccttctatactatgattacacagggcctgggggcaattatcaatattattctggatcccattatgatcttcggacttctcggttttcctaagctgggagtggcaggagctgccatcgcaactgtaaccggccagatcatcgcagccatcctggctgtctggtttaacctgaaaaagaataaggagttacatatcactctccgcggttttaagtggtccggtaaaattattaaagggatttactccgtgggtattccttctattataatggcatctatcggctccgttatgacctttggcatgaataagattctgatcgcatttacctctacagctacagctgtatttggtgtctattttaagcttcagagctttgtatttatgcctatattcggactgaataacggattggttccaatcgttgcctataactacggggcaagaaagagctcacggattaagcaggcagtccttgtcagtgtcattgcggcagtgagtatcatgcttataggactggcacttttccagctcataccctcccagcttctgaatatttttaacgcctctgacaacatgaccgctattggggtaccagccctcagaatcattagtctgagttacctgctggccggtttctgtatcatatcgtcatccgttttccagtctctggggcacggaatgctgagcctttgggtatccgtcatccggcagctggttgttcttctgcctgcagcttatctcctctccagagttggtggcctgtcagcggtatggtgggcatttcccatagcagaattgttttcctttgtactgtgcgtgctgtttctgcgtcatacaaagaaaaaggaaattgacactttagaacaataagatattatatccacggttttcttgtgtaaggcttcacgaatctatatcagctatctgtcatctgatatagattcacacagccatctgcggttccgttctctactgtaaatgaaatgcctgccctgtcatttaccgggtatactctgcctgacagaaccgtgctgtcatttacgaaaacttctaaaacggaattgtcaataaaggcacgtatagacacatgctgttcatctccccgatacctgctataaagagagtctttcacaacttcaggaatcacagaagatctttcacggtatatccaaattgtttttgccctggacaggatccagatatctgtatattcagtcccgtcttccgagtcaagtacccgtattctgatatctccgtctgtctttaagaagcattctacttctgctgtcatagaatgacaggacatcttttttgtgcctgaaaacccacaaagctgatgtgtttctgtaagctttctcagtaatttaacctcctctgcgcaggagaaacttaccatgtctccgtcctccaatgtgactactctggggagagagatggcgccggaccagggtccgtcagtgataagttcatttctgtcatcttcccgcagccatccccacataatatagcgccccttgggatccttgaatacattagaggcacaaaagcagccactatctataatttcaccgtgccgagtcacatgaagcgaatagtcttcatttaaagtccccacaacatactgtgcattttcctgaaagcaagtatagacaaatacaattttctccccaaagaccatcacattgggacactcataaattgttgttctgcattctgtataaaagcagttcttatattcccaattgcggtaatcctttgattggtagatatgaaatgccgccttccagccatctacaattcctgaaatgaccattaagatctctcccccatactgaaatacaaaagggtctctccaatgggtcagatattttccctgccttctgttctgttctggggataaaataggattctcatctatctgtttccaggtcttcatatcctccgtgacggctatccactgctccgcgccctcaatatgtccccgctctccatgtccataggatcccacacttgtgtagaaaatctctaaccggccgtcgttttcatatgcacagcccgagaagcaaaaattttctcccctatcttttgccggatataatgcaggctccagatgactccaatggaccatgtccccgctgactgcatggccccagtgaagattcccccattgatatcctgaaggattatactgataaaaaaggtgatacttcccttcaaaatatatgggtccattggggtcgttgatccaattctgctccggcctgaaatgataacttggtttatgtttcatataatcacctcaatgtctgaatgttgaatgtatcttaactgcatttcccttctccgaggaggcatacacaccttcaatgatttctaccacatggacctgtcttgtaattgaacatccatcctcagggaatttctgattcttatccactgcctctgcaaactcttccaaaatatctatatttaaatctgacatatccacttggattttgtagcaatctttgaatccggcataagtgattttggaatcacttactttctgatatggagaatacacaattacccgatgttcagaatcattcatattgatataaataattcctttgtccccataaattctaaactcccatacacagagatccttatctgcagcagtacaccagtttgcacgtatgctggccatttttccgtctttccagctcatgactaccactgcattgtcttccaccgtgggattgaacttttctcctttcagactggtcctctctctttgcattatatttgtttttccatacacctcgtccaccggaccgaacagatatgtaagcatgctgattgggtatatacccaaatctgccaatactccccattctgccactgatttatcaaaaaaccatggtgcgtgtaatggtccctggtgagcaaagactccgtctactgcacaaacattgcctataagcccctgaccgatcatctttttcacttctctgatatgtgtatatgcatcgttggggagtgccataaatattttattggtcttatcagctgcctctttgatcattaaagcgtcctttaaattagttgcaaccggtttttcacacaacacatgttttcccgcatttaatgcctctgtaaccaaacgggcatgggtagtgtggtaagaggttacgataaccgcctctacctctttgtcctgcagcagttccttccaatctgtatattcttttacccgaagctcttcggctgttttatgaagacgttcactgtccgtatcatacactccaattaattccgttttgtctttcattctttcgaatgaataaaaatacctgcctctggctatatcaccgcatcctgctaacgcgcatttaagaattctcataaaacctctccttacttgtattattcatctgcctcttcttcttttaaaattctgcggatatactctaaagattcttttacatatttttcaggtctcttcaagcctcccagttccatggaaagaaatccctgataccctgtttccttaagtgctctgacaaatccattccaatcaattatccccagtcctaccgggtatgaataacaaagcagtccatctgtatctctaagatgtacatgaaagattttttctctcagtttatagacagaccacggaagatattcccgctgcatggactgccatgccgcatcaaaattggttccaaaataaggactggatattctgtcaaaagccctgagcataccgtctgttgtgccaatcacaacatttgcatggccctcaagagcaaatctgattttatacttttcgcacagctccacagctttgcttaaggattccacataccgctcccatactcctcctgcgtcaaagtttggaggcatctctatcatatgtttgggctcaaaaagttcaaatccaggcgcatacgggtgtatagatgacggcaaatacggaacgggtgctcgcagttccttaggccagttagaaactacattaatcgtatccgtaccaagtttggcggcagtctctaatccccgttcaaaaaagtctaatgccctgtctctttttttgtcatcgttgtctaataaatcttctactgcatgtgcatataagataaattctgacagctccatgttatagcccttaatcatcctgtccagttcccggcagcgttcatccgtataatactcatttaaatcttctgccgtataggcaattaattcaatgccgtcaaatcccagttctccaatcgtcttaaccgcttcttcatacggcggttcataatgaggatgtgtaaagcatcctactgctgctcctactttcataaattctcctttcactgttcctagtctttcacgcctcctgcagttagtcccaaaacaatatatttctggaaaaagattgctaacagcaggggaatcaaagttgcaatacagccgcctgccatcagcattccgtagtctatccccccatgagtggtactaaattgcgataaagcgactgtaagtgtagttgtctcttttgagttcataaagatgagtgcatacaaaaattcatcccaacacattaaaaagaccaacgtcccaactgcaacatatcccggttttgccaagggtacaataattctcaggaatgcctgaaaataattgcacccgtcaatcctggcagcatcctctaaatcaggcggtattgatttaaagtagccgtgcagtacccagatggcatacgccattaccattccaaggtataaaacaacaagagtaacgatcctgtcaatcattccgagtctggagacagtctcatacagaggtatcaccaatgacacagttggcagtaattgaataaacaatgccagaatcatcagcatattgctgcctctaaacctcagtcttgcaaaggcatatgctgccatccctccgataagcagagaaatacctgtggtaacagcagcaactttaaagctgttaaatatggaatgaataaatacttctgatgtacttgcgattcttcctccacggaatacttttattatcgaagaaaagaactcccggtatctgtaaaaggtgacattctcaggccagacgacgggcccccccgtcagcagttcactcttctcacaaatagaagaataaaacatccaaagcaaaggagcaaacgtccatagcagcagcagtattacccccagatagattccgactcttccaattcttctttttatacttttcccttttttcttcataggccatacctttgattaagcttccttcaaaatcctcagatataatagagttatcaaaaaaataatccctgctataacaattgacagtgttgcacccaaaccaaaattcaggcttttaaatgttgtgtaataggtatagaagctaattaccatggtgccattggccggtcctccattggtaagcatatatacaatatcaaacaccttcatggtctgtgtggtacgcataataagcaccaccagtattattggcttcatctggggcagaataatgtgaaaaaatctctgaaacacgtttgcaccgtcaattttccccgcttccaggcttacagcagatacagactgaagccctgacaagaacattaatacagttaatggcagcatcctccaggtatcagcaagtactatcataatcatagctattttcgcgtcgcccagccatgccacaggttccgatattctcccccactgcattaaaagtctgttaatcaatccataattagcattcagcatccatccccaaagtactgcgtttaccagtgtgggaactgcccatggagcaaggattgctccacggacaaatcttcttcccttaaaattctggttaagaagaagtgcaatcagcattccaaaaacggattgtatggtcagtgacataattacaaactgccccgtgaccttcacagaattccaaaactcagaatttgtcagtacacttatgtactgttccagtcctgcaaacccatttttggaagcatccagcatattcttccattgaaaactgataacaaatgtgttgagcagaggataaatgtttaatgcgaagataacgagcattgcaggacagatcagcttatatgccggcatttgacgattaaattttttattgtcaaccattcttttcatgttttctcctataactcacttcacatacgtatcacccttgatccatgtttcagaatatcatctacttatattcttggttagagatacggacggcttcatccaatgcttcctgtgcagttacctctccagccagtgctttgctcagatttagctgcagcattttgctccatgagctgtaatctgctatggtaggccgcccatgagcataatcaaattgcttcgccataatctcaaactcagggttgtccttgagaatctcaggatcctctaaaacgcgttttaagataggcatatttccaaacttgtcgagtacatctttttgcacctcatagctgatagctattttaataaactccacagcccattccggatatttgcagctggaggttattcccaatccgccacctccggttgtggcagaatactctacctccccctgacctggcgcaatcgccacctctacctttcctgccacagagctgttcgcaggatcattggtaaaatcataagcataggaccagcaggtcacaaaagcagtatcccctgccataaacggatccaaattatccctgtctgagtaagaaacagacgccggatccgctgtgttatccttcatagagttaataaacatgttcagggcatctacccccgctttgctgttaaacacaaagtctccgttttcatttatccactctccgccataagcgtataaggcagcgttgaagtcacatacaaatccttctgcctgggatgccgcccacgcagttccatgtttgcagatccccttgtccatcatattcctgctcatttccagcatttcatcatacgttgagggcggtgcgctgtatccggcttcctccagcatttctttattatagaaaagccattttccttcggtcattgtaggaatcgcatatatatcatcccccactgacatttcatccacaaatgcagggtatagctgtgctatctcttcctctgtaaagtattcgttcaggggtctggcaatccctgattttgcaaattcccccggccacacagtgtcaaccgtcagaatatccagctggcttcccccgagcgccatggttacttctttgtcatgtacatctgcatatgccagtgaaataatatctacatcaatcccatacttttcataaaattcatccgctacataagaatataagtcttcgtgatctgtagtagtgaccatgacaagtttttctggcttatcttccgccttcccctctgcctcagtcccagctttgctgtctgttgtctccttccctgcctttccctcttttcctgaattcccgcatgctgccaatgatactgtcaaggctaacgccatcaacaatgctaactttcttttcatcttattctctcctttcatatatggttaagtagcacacttttatgggtgtattacaaataccttttcagagtctcaatgcttaatgccgcagcctccagttcgtcatatccatccggttcgtcctgttctacaatcagccactgagcaccgctttcttctgccgcttccactaattgccctatatcctgacagccatatcccaggggactataggtaaaccctttctgtatcttatgagggccatcctttgtctcttcctttaacagtccatagggtacttccccttctttaccgctgctcatgtagtctttcaaatgtactaccggacattgacctttatatctgcggatataagcagccgggtcaaatcccgcgtatttgatccaacaggtatccagttccggcagcagacatttggaaggaatactgtccatcaaaaaatccagtccattttttcctgaaacttctctgaattcaaaatcatggttatggtacagcaattgcatcccggcctcccgggacctctctccccattcagacagcctgcagatgatatttgaaaacgccgggttccctggccgatactcctcgtccagatatgggatggcaaggtattcacatccgagtattctgtgttcctggatgacttgctccacgtccctctcccatgcggtcaaagggacatgactggaaacggcacttaaaccttcgcggtccatcatctcccgcagttcctccggtttctgtccgcaaaatccggctaattccaccccgtcgtagccgaattcggctagactgtgcaggacggctgagagatttttcattgctgaatttctgcaggaatacaattgatatcctatcttcatattatcttctccctttctctcttgtcagcagttactttatgtcctgattatataatcccttacctgttttatctacatccatactgtagttttctttaacaattttatcattttagaagttttgtccaaaatattccatttaatgttatacttttttaattatttatattattttcatctattatcgttgactttcccgttgtgctttaatattattaaaataacactctaagtttctttagtttatacccaagggcacccctttatacctgccctttcccatatggtgtatcgtataggagatggatttatgtacttagaaaacagtattacaaactcattgcacagtgaagattcgcagctgcctttttcagtttttttctatcatacaaacagttcctggcattggcatgaatttctagaactcatctattgtctgaaaggagtctatcaaatatgggtcaatgattcctgtatcccatgtatgccgggagactttgttattattgatgccagagaaccacatgcaacaaaagccatggagccggattctgaaatcatggtcatacaagtagaatccaatacattttctcttacatttacagaatcaatgatatcaaggtatcaccattattttgacagcagcccttctaatttccagcgcaagatacaaattacagaaaacgacgtgctctatcatctttttggggatttaaaaaatgaattttttcagaaagaagtggcttttgagttgagtatgaaagctgatatagaaaaaatatatgtatatttattgcggaactgccagattagacagccaaaaatatttggaacacagctaaaagatttgatacgtctccagccggttttggactttatagaaatgaattaccgtaaaactatcagacaaaaagaaatggcacagctgatcttcctcagcggtgccagtttctgccgtttgtttaaaagagtaatgggaaaaacattctcagaatatataaatgctctgcgcataagagaagccaaaagattattgctggttacaaatgaaaagattatcaatatttctaccactgtaggatatgataatgtcacttactttaataaagttttcctccgggaatgcggcctctccccgggttcatacagaaagaatgcattctcagcactatcatgaatccggacagtctatttcctatgcctgaggagagtctgcatcttcactctctcctctcattggactgccttatactttttatattttatcctgattgatttaaagaccacaattatgacaaagaccagtacccctgtcagcacaattgtcccacccggttttagtttcccgtaataagacacggtaagccccgccaccgtaaataaaactgctaaaaatatagagaggatgagagtattacggtaactctttccaatctgcatcccacaagcaacaggcactaccagcatagatgaaacaatcagagtccctacggtccgagaggcaatagaaacagtcagagcggttaacagagtaaaaacaaaattaaccgtttttaccgaaactccggatattctggctgccctttcatcaaaccccacatagaacagttctttgtaaagaagtaaaaaaacaagcaatacaagaacactcacaagaatcaccatccagagctccagatcgcttatggccacaatgcttccgaataaaaagctgttaaaattagcactattttttacaaatccggacaacacccctgccagcccaattccggcagacataacaatagcgatagccatctccgaatatctgggagttttctttcgaatcccttcaatgccaagggctgcaaagatgcagaatgcggtagctcccagtacagggttgatacccagaaggaggccaaacgccactcctgccagcgaggaatgcgccagggcatccccgatcatagacattcgctttaatacaatagtcatcccaatacagggcgttataattgccagaagaatccctacgataaaggccttctgcataaaagcgtattgaagtacactcattcctctgccaccctgccttcctctatgcggaaaatccggttgattccctggcattcccgcagcgctccgtgtgtcaccatcagtatcgtaagcctcgcctcccggttaaaactgcacaggatctcatagaactcttctatagacttggagtccatgccggtagtaggttcatccagtatgagcagagaaggctctcccaccaatgccctagccagcataaccctctgctgctggcctcctgaaagctctccaattctgcacttcctatattcctccatccccatcctgcccagcatctctgccacctttttcctgtgaacggctttggggaaatgaaaccttccaatttgcgcataaagcccggtcagcacaatttcctccacagttgcaggaaatccctgattcagggcaatgctgttctgggggatatatccaatctggcagtttttaaatacttttccagggtctgtcccaaatatccgcacctctcccactgacggggtaagttctcccagaaccaattttaacagagtacttttacccgcaccgttttcccctaccagaacagcaaagtctccttcttctatcctcaggtttcccctgcagataaccggggctccttcataggagaattccgcgtccttcatcgttataacactcatactgtctctcgctctccttttatcactgtaaagctttcaccaaagcctgaagattctctctcataacagaaaaataatcttttccttcctctatctcttcctccgtcagtccctccaaaggattcagcaccgctgtgtcagctcctgtttcttttgcaatggtattcgccaccttaggactggtcagctcctcaaaaaaaatggttttcaccttattttccctggcaaactctataatttcttccatcctggcaggatccggctccgagtccggggaaagcccctctatacctatctgattcagtccataagcctggcacaggtacccgaatgcctcgtgtgccacaataatgtctttccccggcagaggttccagctgttcttcaaactcttgatccagttgagcaaactctgctttatatttgctgcagttttcctgaaaatactcctgcttatccggcgccgctttttccagtgcctcccctattgtctccatctgcttttcggcattccggggatccagccacacatggggatcatagactccctcttccccctgatgcccatggcttcccagcagttctatgtcctctgcagcttctactacaattagctccttattttctaatgtgttaagcacatctttcacccagtgttccatcttagcaccattgtaaataaatacatcagcctcctccagtgcagcaatatcctgagcttccggctcccagtcatggggttctgttcccgcgggaaccatagtcgtaacctcaacctcatcccctccggccttctgggcaaaatcacccatggtgtagaagcttgccataacctttaattttccatccttttcttccccagcctctggtttgcatgccgataacacacatacagctatgaggcctgtcaaaaccaatcctgttactcttttcatttatctgtctcctgtcctattgtccctctgtctgcacgctctgcagtatccgtagagctcaatgcggtgaccggtaatatcaaatccatcctccgccacctgaattcctccgctctcaaaagggcatttgctgataggcactcttttatggcataccagacagactgcataatgctcgtgaatatttcgctccagctcatagcgggccatatcctccccaggaagaaaacttttcttcaccaaatgatgttcttcgaaggcattcagaactcgatatacagtagacaatgcatattggcattctttgggtttttccagcagcagtatcttataaatctcctgggcagttacgggaaccgccgatttttccaaaatcccgtatacctcttctctctgcttggtgcgcttaaacccccgtccccatatgttctctgtctgtttttctttcatcccatcactccttatgcaaatgctaatcattcgcatgtattatgataccatgcacgcaagatttgtcaaggggctttgcaatattaaaaaagagcctggttgttcttaaaccggctctttttctatatttatctggtctgcagaaatgtactttctttgatcgcatcctgatctgaaggatatttttccaaatatgcagcaattttttcctttgcagtcccatactcctgctttttctcgtacaccaccacttcattgtacagcagactttgattttcctgaggatcgttgagttccagacccttctggatattctccagggcactgtcgtattctccgtccgcaatatcgcagtatgccatgccattatatgccttggcggattcccctttatccgccagatactgctgatacatttgtctgccgctggaggtatcccccatggccacatacaccttgcccagcagaagtgcggcatccggattcccgttattcatggaatgaatcagttcttttttggcattctcaaaatcttccagataatagtaaactcttcctctgtcatattcatcctgttcgtccctggcttcaattttcagagcttcctccagatattcttccccgtccgctttcatatccttttcccgatatgcacggtaaacgttaagaaaatcctcgtaatcctctgatttatctactgctttctgaaaatccgacttggcattatcatagtcatcctgtgccagataaatctggccccgcagaaagtaagcatccttatctgtctccatgtccagtatatcgttgcaggtattcagcgcgttatccagaatcccggcctggtattcggctgtggccagataatacctgatatccttctgcatcccttcttttttgccatccagactcttcagagcactctggaacgccgtaattgcttcctcatagtttccctgcttgagataagcgatcccttctccccgataggactctgccacctttttgtcatctgccacagacaattcaaagctcccaatggcatcctcatagctttcctgctccagcgcctgtacgccttcttcgtagtggctgagcttatcgcttccacagcctgccgtcaggcacagaacacagctcataataagtatccccttatattttatcattctgcgttcctcttattattcagcgatcaactgttctctttccattacctgaatgactctgttaacctgttccctgcagatgtcatccgtggcggcctctaccataacacggaccaccggctctgttccgctctcccttaccaggatacggccttcatcgcccaaatcttttcccacctgttctacaatctcaactaccttcgcattctctctggcttcctgcttattaaagactcttacattctttaacagctgaggatagattttaacttcactggccagagtgctgagcggcagtttcttctccagcacagcttccataatcttcagagaggtaaggattccgtcacccgtagtggcatggtgtgcaaatataatgtgtcctgactgttcgcctcccagcatatgaccgttatccatcatattctcgcagacatacttatctcctacagctgtcttttcataagaaatcccttctctgtcacaagccttatataagcccagattggacataacagtagtaacaatagtattgttgttcagttttccctgctccttcagatatttgccgcagacataaaggataatatcgccgtctacaatatttccctgatcgtcaattgcaatacacctgtcggcgtctccgtcataggcaaaaccaacatccagctgtttttcctttacaaactcctgaagaatttcaatatgggtagagccgcagttggtatttatattggtgccgtccggctcattgttgatcacataggtcttagctcccagtgcatcaaatacactttttgcgatagcggatgcactcccgttggcacagtcaagacccactctcatattcttgaatgctcttgtaggaatggagataaggtatccgatatagcggtttctgcccgctgagaaatctacggtgcgaccgatattctccttcagcgcaaaaggtatctccgggatctttccatcaatatatgcctctatctgctcctccacggaggcttccatcttctgtccctgtccgttaataattttgatcccattgtcatagaagggattatggctggcagagatcataattccacagtcaaagttctcagtgcgcaccacataggatacactgggggttgttgtcacatgcaggagatatacatccgccccggacgctgtcagtccggcaaccagtgagtactcaaacatataactgcttcttctggtatcctttccaatcacgatctgtgccttgtggttctggccaaaataccaacccagaaatctgcctaccttatacgcgtgctctaccgtaagattaacatttgcttctcctctgaatccgtctgttccaaaatatttgcccatacttctactcctcacttattcaatcaatacatcttctgtgtgcggtttctagttatcaaaaagcttttccttatagatccctttgcggattaactctgcaaaggcatccacaactgtctgcttatcctctttgtaggtcaccccaaaccaggtgtctctggtctccaggagagtcacttctgctctcttctctctgataagtccgtccacaatggttggaagaagatattccttcttactatcttccggggtaagttctgaaagaaactccacaaaccccgcttccagaacttcgaggaattccggggtaagcccccacatgttcatagacacataactttccgcatccagaggaaggatactgccgtcctcctgcagcactcctgccccgccttctgtctttacgatattgtgagtctccgttaccttgaccagatgactgtctttgtctacctgacatacacctcttgtcaccgaaccgttatcactcagggtatttcccagaataaaaccagccatgcagatggaaagagtctcttcctgtcttggctgttcctttaccaggtaatcatgcactttgacaaacgcttcttttccatagtaatcatctgcattaattactgcaaaaggctcttttatcagttctttggcactgagcactgcctgcccggttccccagggctttgtgcggtcctccggctttttaaagccttccggaagctggtctagttcctggtatgcgtactctacctcaacaattttttcgattcgccggccgataatctctttaaagtccttctccagatctttcctgataataaataccactttattaaatcccgcttctaatgcgtcatagatggagtagtccatgattatttcaccattcggtcccacaggtgccagctgtttaacgccgccgccaaatctgcttccgattcctgccgccatgataactaaagctgtttttttcatctgttcctcctgtaccctatcaaagtatttcttagtaatcttcctgaagattgctaagcttagccgcctggtctgctgcgatcaggctgtctataatttcttccaaatctccgttcattatactatccaaacggtgcagcgtcaatttaatcctgtgatctgttacacggccctgagggaaattataagttcgtatcttttcggaccggtctcctgttccaacctggcttcttctcgcttccgcctccgcatcgtgctgtttctccaattccatctcatacaggcgggaacggagtacctttaatgccttatctttatttttcagctgagacttttcatcctgacaggaaataacaattcctgtaggaatatgggtcagacggactgctgagtccgtggtatttacacactggcctccgtttccggatgcccggaacacgtcgaatttacaatcattcatatccagatggaaatctatttcctcggcctcaggcataatggctacggtaatcgtagatgtgtgaatccgtcccccggactctgtttccggcaccctctgaacccggtgcacaccgctttcgtattttaatttggagtatgcaccgttgccgttgatcataaaggtaacttctttaaatcccccgatcccgttctcgttcagactcatcatctctgttttccagcggttagcctctgcgtactttacatacatccggtaaatttcagcagcaaagagggctgcctcatctcccccggcccccgcccggatttccacaataacgtttttgctgtcattggggtctttgggcagcagaagtatcttcagttcatgctccagctcctcaattctctttttggcaagggatagttcctccttcagcatctctctcatttcagcgtccgactcatcctccagcatagaaatactgtcctctacagtctgcctgctctccttgtactccttataggcatccacaataggctgcagatcgctctgctccttcatcagcttctggaaacggctctgatcattggccactgtaggctcatttaattcccccagaatttcctcaaagcgaattaaaatatcttctaatttatcaaacacaggttttcctcctctaactcttccactggcctaccgcaacccggtcaagtccggccagatcttgtataatctgaatctcctgaaacccttcctctttgaggagagcttccagtccctttccctgatcatatccaatctcaaagcaaagccaacctcccccgcgcaaatatgccggagcactgcggataatctttcgatagaaatcatacccgtcttctcctccatccagagccatttggggctcatggtcacgcacctcttccattagcccttctagcacgccggaaggtatatagggaggattagaaacaatcatatcaaaggttccctcaatcatttcaaacaaatcactttgtaccagttcagcctcgattcccagtctctcccggtttttttccgccacttccagagctagggcagaaagatccgcgccaaccccccggacagggtttcctttcaccaaacgcagctcatggagaatactcaggagaatacatccgctgccagtgcagagatccaggatacgcgcagccttactcccacgtttcaaaacctcttctaccaaacattctgtatcctggcggggaatcagtacattcttattcacataaaacggcagacccataaaccaggcctctcctgtgagctgctgcaggggaatatgcccttttctcttctcaaccagcagtcggtattcttccgccgtttcctccgttaccatcttctcagggtgtacatagtaggagcttctgtctatgttacatacgtgttccataagcagccatgcatcgtgagccccgttttctattcctccctcagttaatcctttcctcccgtaagccaaaagctctttcagcgtagtcatgcagattcttcctttgctttctcccctgaacggttaaaattttcctccagatacgccttccagtcaaagacagcctccacagcggcaatggccacctcagccatatctggatccggttctctggttgtgagcttctgcagcgccatacctggtttgcttaatgcagtaaccagcggattctcgctgctgcccgccagtctgataaactcataggaaacacccgcaatcacgggaaccagcagaaggcggactaccacacgcatcactggcgaaggaaccctgataaacagaaagaaaataatactgactaccatgacgatcaataaaaagctggttccgcagcgcttatgaagccgggagcttttcattacattttccaccgtcagatccataccatgttccacacaattgatacacttatgttctgcaccgtgatacataaatactctctggatatctttcatctttgaaatagctaccagatataaaagaaaaagaccaatccgcacaaatgcctcggcaatggcaaccacggtatccgacgcatttaccctgtgaagcagactggcaatgaaatagggaagtatcataaacagacccacagaaatcaccacggaaagtattacagttactgtcattaatattttattctgtttttcctgtttctcctcatatttctttaattcttcaccggtaaactcctgtttcttctgctcttcctcctcgtcctcttcaaaaaatgaggcggaatacatcaggcaccgggttcccacaaccagagaatcaataaaattaagcacaccgcggacaatgggaatcgtaagaagctttttactttttataaaacttttataatcctcgacctttacttcaatctcctggtcaggtttacggacggcgatagagtacttatctttatgccgcatcatgattccttccataacagcctgtccgccaatattagatgatttcatgcacattcctttctgcctatgctcatggttcatttaccacacataagtttcctgtaaatgaacaaaagaactactcgcgcaagcacgggtaattcttttgttatatgctgtcgcacgactttctgccggcgtacaccagtccaattattattttgtgataccgtatttcttgttaaacttatcaatacgtccgcgtgcctgtgcagctttctgctgtcctgtatagaatggatggcatttggaacagatttctacgtgaatctccggtttggtagaacctgttgtaaacgtattaccacagttacaagttacagttgcctggtggtactctggatggataccttctctcatttttttcacctcatcaatctatttcattcttgttactttgtgttctgatatttaaacagctttcaaattatatcataatccattataaattgcaagttctttagacaattttttgctttttgatcatctgtataaattcctggttattcctggtgcggacaaacatattcaaaatgttctctaccgcttcatctgtcttcattccgttcagtgccctacgcatggaatccacagcgtcctgttcttctctggaaaggaggagatcttctcttcttgtgcctgactttggaatatcgatagcaggaaataccctcttttctgagagctttctgtccagtaccagttccatattaccggtgcctttgaattcctcatagatgacatcatccatcttactcccggtgtccacgagggctgtagccagaatggttaggcttcccccttcccgcatatttctcgcagctccgaaaaatcgtttcggcatatggagggcagccggatccaaacctccggacaaggtacgtccgcttggggggacagtaaggttataggccctggccagacgggtaatactgtccagaagaatggtgacatcttttttatgctctaccaaacgctttgcccgttcaattaccatctccgacactcttttatggtgatccggaagctcgtcgaaggtagaatatattacttccacattctttccctgtatgttttccttaatatctgtcacttcctcaggacgttcatctatcagaagtataatcaaatgcatctccgaattatttctcagtatggacttggctacatccttcaaaagagttgttttacctgccttcggcggagatacaatcatacctctctgtccctttccgataggactcagcagatctacaatccgcatagccacacttccgccctggcgctccaggcgaagtctctgattggggaagataggcgtcatatcttcaaaattgtaccttttcacactctcattgggtgagatcccattaatggaggtcacgtacagcagggcgctgaacttctcattctggctcttcactctggtgttgcccttcagaatatcacctgtctttaaattaaaacggcgaatctgagacggggatacatagacatcattctcccccgggagataattggcgcaccggataaatccatagccgtccggcagcacttccagaatcccgcaggctgtctgtccgctgtccagctgcgactggtccataggaggcttttcctcctgtctggcatcgctctttctttccgtcttcacataagtctgttccggccgctgagtattctctgtcctgtggacacgctcagccctctggggatgatctgttttggatgcattctcaggtttcgcagcttgttccgcttttgccgccggctcagacttctgtacaggatccgccttcccttcacttctttcctctgtctcattaggcatttcttttgccgttttttcttctttttcgtcttcttccagcattctgtcaatcaatgcacttttcttcaacgtagaaatccccctcagtcctcttgccttagccacttctttcaaagcaccaagggacagggattcatacttttctctcatcatagtcttgtcctctcttttttagaaatgcttctactggatttcttgtctgaaacgacagcgatcataaagatttatatatagtctataaaaatcaagatattattatctttgattatcctatcacatttcaatataaaaggaaagcagaatttaaaaatgcaggagcgttaggctcctgcttggtattatggttattcaaacggcttttcttttttcactttgcaccagataagatagcctactccggccaccagtaaggctattgcgatcccctcaaggaacccaatggtaaaatcgcttagataggcaaactgtttgcacagcagcgccagcaaaagtacaagagctcccagcgggaggcacatctgaaacttgcgcctcagcttacgcctctcttcttccctctttttatccaggtctgttttattactgtttatcttcatatgtatcacctttaatttcttctcttttcagacaggcattttccctattatcttatatcctcactggtactttgtcaaggaatccggcaaaaggtgcttccaactttatttgctttatgcgatctgaatcacggcttttacaatatcattcttattgttcacgctgtagtccattgctttttgtacctcgtccaggggaaatatatccgttacaatcccctttaaatttaccttgcccgatgccactgcttcaatggccatgggatagatgtgacggtagcggaatacgctcttaagagtcagctccttatccagaatgaggctcacgggaagcgttatctcaccgctcttactgtaccccaccaaaacaatatccgatccttttttagcaacccggactgcctgtcttgtagtaatctctgtccccgccgtttctatgaccagatccattcccctgttttcggtaatctgttttacacgttcgattacatcttcctgggcaccatttatcaccccgtcagctcctaattccatagccttttgaagacgtttttctataatatctaccacgtatacttcagaaacccctcttgcctttaatgccatcatggacaccagaccgatacatccggctcccattaccaaggctttctggccaaggtgagcatttccctgaatggctgcatggaatccaacagccagcggttctatgagtgccccttccagggtgcttacattctcaggaagtttataacacaagtccgcctcgtgagccacatattcctgaaaaacaccgtctacaggaggcgtggcaaaaaacaccacttcagggcagagattgtattttccttccctgcagaattcacagtgaccgcaggttttccccggttccagagctaccctgtctcctgcctttagatgtctcacctctttccccacctccacaacggttcctcctggctcgtgtccaagaacaaaaggcggttttaccacataatcaccaattgcacctgtctcgtaataatggagatcactcccgcaaatccctacatattcgagttttaccaacacttcgctgtcccccacttttggaatatcgcgctcctcaaatcccatatgtcctgttccaagcataactgccgttttcatcttaccttccatgttctcttctccctgttttgttttatcttttataaattattttattaaagtaattatattattacccataatgccatatatgtcaatccccttgcagtagaatctatattttagccaaatatgatatctttttttagcaaaattgtaaaagggcatcttccccaaaacaggaacatacccttgtacaccaagtctatacagtttcaaaaaacgaatccacaaatcccagtgtggctccatacgcagatgcttcgaatttatatttccctgtctttagataggaggtatccaaatcaaacttattgtcctgcaaaactctttttgccagctccggcatgaattcctccagatatcctcctacatatccgcccagaactatactgcagtcaaaggccatccgcagatttgtgactgcaatggccagactgtccaggtagtcattccatacttcctgaacctcagcgtcctgattcctgaccttttcaaaaaaatcttccagactgccgccggcatagtcctgcagaatttttgctgaacagtacgcgtcaatgcagcctttttttccgcaataacaagtcctgccattgcgctctattaccatatgcccaaactccccgcttctgaaattttctcctttgtacagctgccccccgaggtataaggcaccgccgattgtattactaagagaaagataaaccgcattcgtgattttatcgtccagttccgcacacgctgcgctgtttgcgtcgttctccagctcacacggaaatcccaaagagctttccagattgcgaaagctgacattctcaacattcagtgtatgagaacgtatgaggattttttgcgctctgtccacaatacccggaagggaaaaaccaacccctatgatcttccctttctctgtccctgccttcctgataaattcccggatcccctgttccagacagtcatagtattggatactattttggaaaggccggcgtattctgtgggactgaataatttcttttcttgtatttaccataaccatagtaatatgattatttgtaatgtcaacaccggccgcatacccggcatctcttacaatagacagcgctttcgcttttctgccgccggtggactcatattctccctcttccaccacgatccccgcctccactaattcctttacattctgcagtgtggtaggcatactcagattcagtttattggatatctctgcctttgaggtactgccctgtccagatataaacctggcaattctggctttattcatgcgttttgtctctaatatatttaccggcatattccattccttccacttttatcattcatttaataaaatacattatagatattagccatagaaaatgcaaggaaatgcacagaaaaacaaaaagagccttctcccacaatcgagaaaagactctgtgcattcagaaaagctggacatttctttatttcctaaatgtactgcggataacaggacttgaacctgcacgtcatggacactagaacctaaatctagcgcgtctgccaattccgccatatccgcatataactctatagttctgaacgcttccctttcgggcaggcttacggcttcgccgtataataaaaggtataaaccaaaagtttatacctttgcaatgagacatcggggattcgaaccccggacaacttgattaaaagtcaagtgctctaccaactgagctaatatcccatagtctggtcctgtctccaatcggcaaggtcccagagctgggctagctggatttgaaccagcgaatgcaggagtcaaagtcctgtgccttaccgcttggcgatagcccaataaaaaaagctgtacactcatcagcacacagcgcaaggtggataaagggattcgaacccttggcctccagagccacaatctggcgcgctaaccaactgcgctatacccaccatacaacgtgcctggagggattcgaacccccgacccacggcttagaaggccgttgctctatccaactgagctacaagcacatttcctctctaatgagattagagaagcgggtgatgggaatcgaacccacgtatctagcttggaaggctagtgttctaccattgaactacacccgcacaatgttatcgtctttactgcaataactttacgacagtcggggtgacaggattcgaacctgcgacctcctggtcccaaaccaggcgctctagccaagctgagccacaccccgagatgtattttgttgtctgctgagctcactttacctcttttttgctcaacgcaagatataatataccatagcattttccatatgtcaacacttttaatcaacaaaatacatatttttctattttatactctttcagtttttcaggtagtttatagtataatgagcatccccttttctgtcaatctccatgataagaaagctgggttcccttccaatttgtctgggatatgaaaggctccccgggttcaggatcgtgataccctccagctgttcaatcaaaggccggtgagtatgaccgtacattacgatctgaacgccccgaactctcccttcttcctccaaccgctctgttcccatggaaactccgtaataatggccgtgggtcagcagcaccttgtagttccccagctgtatttctctttctctgggaagatcagaaaaaaaatcattgtttccggagacaatatagacaggacacccagccaggcattctatataatcctcatgcccttctgcatctcccagatgaatcagtgcgtctaccggggcaaccttctccagtacccgttccagattccgttcacgtccgtgggtatcgctaaccactaatatcttcatccgcagccccctccctgtctatataagatgttcccgaaacatcttttctttcagtgcccgcagagcatttccacggtggctcagtttattcttaacatccatagacagttcggcagtgctgcatccatattccggcagatagaagatgggatcatatccgaaaccattgcttcccctctcttcccatccgataattccttcaatggttcctcttgtagtaatcaccctgccatcaggaaaaaccgcacctatggcgcagacaaatcttgcagtcctcttatcctccgggaccccgtccaggcgttggataatgttgtgatttttaattctgtaagaagtatcctctcccatatagcgggcagaataaatcccaggctccagattcagatagtctacctccagtccggaatcatccgccagcacaatatctccatgcgctctgcacacatccgtctgcgcaatggccctggctttgatcaatgcattttcttcaaacgtgcttccgtcttctacaatatcaagttcaatcccagcctctttcatagacagaatatccatattcaagtccttgagaatttcccggatttcacgcattttaccttcgttgccggttgcaaatataatacgactcattcctgcaccttcttctttatataatacttgcaagaattttaccacaattcacggggcaggacaactgcttttatcaacatggaccagcattccccgtggcaggctcaattttattccggtttcgtctttttgggaggcttcggccccaaaaactgatagaaatatgtcttcagcattccattataaattttcctgtttttatctgcctttctgccaatgtatttctctgcatcctcatagctggtgattagatacatggaccaggagtcaagagcggcaaagctctcccctatctctgtatacagaccaggaagttggctgcgatcttccaaacgttccccataaggaggattggtaatcaggaacccatatttcttagggtgccgaagctggctcacttccctctgctgaaaatgtatcagatgctctacacctgccgctctggcattctctcttgcagatcgaaccacgtcgccgtcgatgtcatatccctgaatatccacgtctatcttcgtatccatccgttcccttgcttcattggcagcatcataccaatgccttctgcccactacatttttccagtcttctgccagaaaggagcggttcattcccggagctatgtctgctgccagcatagcggcttcaataggaaatgtcccgctgccacagaagggatctaccagaattctgtctttcttccagggagtgagcataagtaaagatgccgcaagtgtctctgtaataggggctttggcagtcaactgccggtagccccgcttatgaagagaggttccggtagtatcaagtcctatcgtagccacatcttttagaaaagatacacgaatcgggtaactgggaccgtcttcctcaaaccatgttacctggtattttccttttaagcgctctacaattgctttcttcataatagactgtatatctgacgggctgaacagcttactctttatagaatttgccttcgccacccaaaacttcccgtctttgggtatataattttcccagggaagctcctttgtcttatcaaaaagctcctcaaatgttgtagcctgtatctttccgactttaatcatcactctctcagcagttctgagaaatacattggcataggctattgcctctgcatccccccaaaaggtcacttttccatcctctacctgactaatatcataccccaagtctatgatttcccttttcagtaccgcctccagcccaaaatggcagggggcaattaattccattcgttccattcttgtcctctttttcttaattataattgaatctctttcaccacggttccgtcaaatcccttgatgctgaaccttccgttctccagcaccgcataggtggggatattcccttccttcggaagggatacacttcctggattcagaagggtatagcctgtcctgcgctctgccttaagtacgtgagtgtgaccgtgcagaagcacatcaccctcctgcagcgggggcagatgatcctgattataaacatggccatgggtcgcataaatagttcgtgtttcttctattataatgcagtaatccgccatcacaggaaattccaggaccatctggtccacctccgcgtcacagttccctctcacattgtatattttctgtttataattgttcagcatatgaatcacttccttgggagcatattccctgggcagatcattgcggggtccatggtacaaaagatctcccaatagaagtattttatctgcaccttcctgttcataggcctgcagcatctccctgcaatagtaggctgacccatgaatatctgaagcaatcaagtatttcataaaaatttctcctttgaacagttattacctcattctactatgattaccgccaaaatacaagttgggtcctttataagcccggaatccgccaacaacagactttgtccgataccctttcttcatcaattccctggcggcgaacagactggcaccccctctgtcacaataaagaatcagtgtcttgctttttggaaatcttttggcatattctaattcttcatagggaatgttcacagcccctttaaaatgactctcttcaaattcctctctggagcgcaaatctataataataacgctattgtcaccacaatagctgtctaacatacttactgaaattgtgtctactgttaccataacaaatttatcctttttctttcagtatatgttgggaaaatttacctgtgtaagctcccaaacggaaaaaagacgcggcaacttacgttgctgcgcctttaagttccagaatagaatctggattcttagttgttagagctcttatttgaagatttgttagagcttttgttctgagaattgctgttctgagaattgttattctgagaattgctgttctgagagcttctgttctgggagttgttgtactgagagttattgttctgggaattgctctcgctgtttgagtagttggaagactggttattgtactcgttgttcattttgtttttggttgatgtttcgtcactgtaatttttggacataattactacctcctgaataacgttttttgttacgttcttattattccttgttatccgggaaatattcctcataaatcctgccaaatactttaaggtacaaaaataaattaaattattgcttttttcttccttttatattataataatctagtaaaaagaatttacccttcaaaaaattttttttacattataaccccttatttaattatttatactcccctcgaaatagccggtagctcccctaccggctatttctctttttatttatgagtgagtatagaaatttaatctttcaaaagagggactgccttacaggcaatccctcttttactaccgtctcttcgaaaaatatgaaatcacaaagccaattaacacaatcggcagtataatcggtaccagtacccgcagaatgctgaacagcactgccagtatcactaatacgatcaacactatctgccaggttttcatagtgccgccccgtccaaaagacctgccccgggattcctgcgactctgtctcataggaatatgcagtgccgccgtcactggcctcactgcatccctgtgtatcaataattgtctttgctatcagaagcggatcccccagcatctgaatcacatcctgctcggcaattcccgctctaactttatcattaatatactggctgtaataatctatgttctctcttaccttccccggagggatttccccggttaacttacttcttaaagtatctaaaaattcccctttactcatttgagtgactttccatcctttcctgcggtaactcatggttctgtctgatctgctgtctgctttcacagctctgatatatatattccgcccattcgccaaatgccttcacttggttcatttctgttattatatcataggggcgctaagatacaatggtattttttctgaaggttttataaacagaattaattttttatttcccataaagacataggcattgccttcacctcaaatagaaaatggactataatttgtactatagtccattatacccaaaccttcttttctcaattcctgtaagaaactttattttcccgtgcggtaagcagcctccaaaatatccagtgctccctcgattccaaaccggcagctatccaccgataaatcatacctgctcaaatccccccacttctcatctgtataataattgtagtagtaccttctctgcttatccatcttacgaatcagtgtcgctgcctccttctcgtccacagaagcccgttccattattaccttgatcctctcttccagtgctccgtatatgaatactttgatacagaagggatatgctctcagtacgtaatctgcacaccttcccacaatgacacagtcttcttttttggcaagatcgcgtataaccttagactgttcgctgaataaaacgtcattcattggctcaaaccggaatctgcgttccatctgcacatcgtcctcgacaggatatcgccagggattggcccgtttttcgtctacttttcgcagttcttcgtaaggtatggaactgttctgaccagccaaatccacaagctcccggtcataataatggattcccagcctttctgccagtctctgagctataattctgccgttgcttccgtattgtctgccaattgtaataactctgtttcccatcctatgcatcgctccaatctctttgttttgtataatctaatcttatcatataattcatatccgctcaacggaattctcctaactattttgtataagccatgtattattttgtcaattttattttttcatggaaaacaatattcccctctcctgacagtatactaaaatatatttttttagaaaacctattgacaaccactattttctgttgtaaaataactaatgttgctacggacagcagcaactaaagtgtgcgtttagctcagctggatagagcgtttggctacggaccaaaaggccgggggttcgaatcctctaacgcacggcaaaagccttgtttatagattaaacaaggcttttttgtatttatttacccatatactttccgaatgtcagcagggcttccttctgttttggcgacagcgtctttggaattcctacctggagggttacatagatgtctcctctgcctccccccgttttcttgggagccggaagtccctttcctgccaggcgtatccttgttcccgcctctgttccaggtgccaatgtataggggacaattccctccaaagtcgttacctttatctccccgccgagggtcatagttacaaaatccacactcatggaagcatgtatatgataatcccgcctctcaaagtgaggatgctcgtcaataagcacaattacaaacaaattccttagctctttgtcaaatcccggttcgcatacaatatcctggaaaaaataaaactggccgggacaggaattgggaggtatctttacttttactttttgcgacaccataatgtaaccccgtccgccgcatttgtgacaggccttttccggaatctccccggttccctgacaagtacggcaggtttcttctctccttccggaatcatatcttgcatttgcatataccatatttctgccgtgacccatacattccgggcacacttttccccctgtaccaggttcctttctgcttccgtgacagctgggacattcctcctgatactgaatagtaatttccttaaccacttccctcagtgtttcttccatagtgagatgtaccgctgcgcgaatactggatggcggaatctcatctggctcctcttctctggtacgcccttccccgcaggaaccgcagtgtccttcctttgtgtggctgtgactgctcctgccgctgtgatcatgcccgccgcaggaaccgcatccggagcagtcttcttccttttcctcataagaatacgtatactgataataaaaactgttccgtccgtggcttttccggaaggcctcatgtcccatataacggtactgctgccgcagctttggatcactcagcaccctgtatgcctcggcaatcttctggaacatttctttgtttttcccgtcactgtcgggatgatacttttttgccagccgtctgtatgcctttttgatctcagactcgtctgcatggtaagaaactcccagtatctgataataattctccgtcaccatacaatcacctcccgtcctgcaaagctgacagggccattttaatccacagctggctgttttccagatcagcaatggatttctgcagatagccttctatctctttcatccctgacagcttcaccagggatattaattcatccagatgcatcaaattgtttttattgcagatatctacctgctgtatatattccagaatagaacctggctgattccaaatctgcttttggctgtaatgatactccatggctatccctccgtctcttgtgccctgctctgctttcctgcttatccttattttaagtcaaatgatacggaatatcaactaaaatcatccaatttcctgatattactttttctggattccagaatcccctgtctgggttaccaggatctggtatgtatctatatccagataggttccaaacttatatccggcctccctgacttttccgcaatagacgaatcccaattgttcatgaagcttccggctcctgtcattacttcctgtgataacggaaactaccgtatgaacagcaggattctctctggcaatccttaagatttcctttatcagctctgtcccgatccctctcccctgatactccctgtgaacgtaaaccgacagctctacggtgcccaaataagcctctttttctctgtaaggggataatgtggcatatcctactgccctgccgtcctcctcccatactcttaaagcgtaattgccggtatgaagaacataccatgcttcccactctcttagagtctttttttccagatcaaaagttgccgtcccaaatagtacctcatgattataaatatccagcagcgcctctagatcttcgcgccttgcatgtctcaccatagcgaaatcctccgtcttagcaatttatctgttatgtttacagtataagcttatctttgcctgttgtcatctggtaatctctccgtttctgcgctataatgagtaaatacgttcctgttcactttgctcccggtaatacgctttgccgggcagcgccgtgtgaatagaaaagtaaatgcgcaataactgcaggaggaaattatgggactgaccacactatgctatattgaaaaggatgaatgctatctgatgctccaccgcatcatgaaaaaaattgatataaataaggataaatggatcggagtgggcggacatttcgaggacggtgagagtccggaggaatgtctgctcagagaggtgaaagaagaaacaggcctgacgctcacctcttattcctttcggggattggttaccttcctttctgaccgctgggaaccggaatatatgtgcctttatacggcagacaagtatgaaggagaaatgatatcttgtgatgagggcacccttgaatgggttcccaaaaaacagctctcagagctaaacctctgggagggtgaccgtatattctttcgtctgctggaagagaatgctcccttcttctcgttaaaactgcgttatgaaggagatacccttgcagaggcctgcctggacggcaccgatatccttcattaaaagaagccggggaatgaactccccggcctttcctgtctaaagtttcccctctgtgcacagtttccatgtttttactgtctgctcttttaaaaactggatgaatccgtcaatatttgaggtctcatcaaatttatgcagctctgcaaaatacctgtctttatcctccacgaatatgatcgtagggggatagttatgagtgataagatagtagttcataagtatctcgcccacacgtccattgccgtcagcaaacggccggatctcttcaaagttcaggtgaaaataggctgctgcccgaaggattccatcctgactggtctgcttcacggtggaacatacatcctccagctctacgcgcacggcgcagctcccttttttgaactctccagccctctctcctttggcgtatatctcactatcatagcatctgtccatcaattttttatgtactgcccttaccagttccacagacagaggctctctggcctctaccttatccttcagatagacagccatatacttttggttctcaatctcaatcagcgtatgcagatctccggtaaaattggatacccctccgtgttcatagattcctttcgttgcctcaagggttgtctgcgggtttccaatggcattgcagtgatacgcgaacagcatgcagaattcatttaattcctgttctgtaacttggtttgcctgccaaaatgctacaacatcttcatacataagaatcaacctcctgttttcttgtgtgtaaacggacagcccccaccgtccgtttactgcctgatttgctacactactttctctaaaaagaccgcagacggtttaaagacttctacgaaaccccacaatccctgacagacttctttcaaactgctgcttgcactcattctaccacagaatcccgggaacaacaatataattttaaacttttttggtttatgctaaaaaatttttgtattcacttttgtacaatccattatcctgcacataacttgaaaggagttcattcatcatacttcaaactggaccggtcaaatattatatatctggactttttaatatgtccacttttgtgatatgatatcatgcatagcaagaaaaacgcgtatatctgcttatgatttactgcttactcacaaaaatacaaggaaacaaggaactacattatgacgaagaagatagctgtaattaacgatttatccggatttggccgatgctcactcacggctgccatatcagtgctgtcggccatgggggtgcagccctgcccgcttcccacggctctgctcacagcccagacaggatatcccagttactactgtgatgactatacggaaaaaatggagcattaccgccgggaatgggaaaaaatgcaggtagaatttaccgggatctatactggatacgtagccaatgagcggcagatccatgaaatattttcatttctggataccttctatcaaaaggaaacctttcttctggtggaccctgtgatgggtgataacgggcatacctacggaatgtatagtgatgagctttgccggctaatgaaattattagccgctcaggcagatcttataactcccaatcttacggagctttgtctcctaacgggtacagatttccatggtcttcccgaatcggggaacccccaggttctcctggacacggtgagagagatggctcaggcgctctgtaaaaaggggaccagggcggtggtggtcaccggcatccattttcaggatcctgcagagggcagcaagaaaatagggaatctttatgtttcccctggagaaagcggtctggcctctttccctgatatggatggaagtttttctggtaccggcgatctcttcgcctctgtgctggccggagggtatgcacggggggattcccttgctcagacagtcctcctcgccggttctttcctggaggatgcacttagggattctgtcagagaagggattccttataacgatggtgtaaattttgaaaaatatctgcattatctgctgccgaagcagtaagagaggagaatagatgatgaaagaacaaaataccaagactaccgtactgctcacgttaacagggctttttgcttccatgattaccgttatgactgcttatatcttccatgtgccttacggggcaaacggcggatatatacatttcggagacgctttgatctatgtggcagccgtaatcctgccccgcccctacgcgctggcggcggcggccatcggaggcggcctggccgatctgctcactgctcctatgtgggcacctgctacaatcatcattaaaatgttgattgtactcccctttaccagtcagacaggaaagcttttaacaaaaagaaatataattgctcctttcctctccgccctgctttcagctgcgggttattatctggcagattatgtcttattcggtgccttcggcgcactactggcatcccttacaggcagtgccatccagtccgggggcagtgccctggtatttttggtatttgcagctgccctggataaggtccacatcaagtccagaacagagcagttaattcatcccataaaaaaaacggctcacgccgattagaaaggagccttttacttatggctgaaatcttatatacatacaagcatcaagtgtatgctaacattacaaataagtgcaactgcagatgtaccttctgcatccggggacaggaggagggaattggggatgcccagaccttatggcacaaaaaggatccctctctggacgagattctggctgccatggatgcatttgactttaatggatacaaggagctggtctactgtggctatggagaacccacctgcgccctggagaatctgctggcatctgcagcgtatgccagggagacctatgggctgtccatacgtgtaaatacaaatgggctgggaaacctctatcacaagaaagatatcatccctctccttgcaggtgtcgtagatgctgtctctatcagcctaaacgccccggatgcagataaatataatgccgtatcccgtccgttccggccggatgcttttcaggggcttctggattttgcttccgcctgcaggggaaacattccttccgtaaagctatccatcgtagatgtactaccccctgacgaaattaaaacctgccaggctctggctgattccctggggatcgaacttcggatccggcattttgcttcatagacagcatctgccggttttggggaatggacacggcggggggtgtatccccctgcccgttctttccaggcgccttcatatttatgatctcctccgcatgaaaactctctgcctctctggcatcgtgtgtaattacaagcagggttttacccgctgtatgcgctttgatatacgaaatggtgatggcttttgtctcctcgtccagccccttcagcggctcatccataaaaaaacactccgcaccgctcacgagggcccttaagattgccacccgttgtctcatcccgccgctcagttctctgacaggcttgtgaaaggcctccgagagtcttaatcgctccatttctctcttcagttcatcatttttccatgctttgctgcataccatgcgcagattagtcagagcgctgagattctcacacagtctgtcttcctgaaaaaccacccccagggctccagtaggaatgcctgtaacactgccctgttccggctcctcaagcccaagcataatccgaaacagcgtggtctttccgcatcccgaaggtcccataatacaagttgccattcccttcccaaaggtatgggtgaaatgatccaggacggccaatccgccgtatgatttacagatatctttcattattatgtccatacactacgtcctttctattcttctcaccataccgcggagcagcatcaaaaagcacttctcaaatgaaaagcttaccccgataattacaatggtccacgcgaataagtcgggagtatttaagtatatcttggcatggtagagcttttctccgatagaacctgcaggaatccctatcacctcggccgccgtgccagccttccagcacagtcctagagcaaggctgcacccagatataaggtagggcagcagctgggatacataaatatacacgatctttcttcctgttcccatggaaaacacctgggccatctccagcagcttttgatccgtattccggatgccctggtatatatttgtataaatcacgggaagtaccatgagaaaagagataaacactgacagattcctggagggaatccagataaggcataagataataaaagaggccacgggtgttgactttatgactgttatcaacggccgaagcagcacagagaacacccaaaagcgggatgccagggcggccagcagaattcccaggattaaagccagaagaaatcctgacacaattctgataaagctaaagcttacggaggtccagaaatctgccgtaaaaaccagttgtcccagttttacggcaacagaaacaggagatgccaaaagtatctcctgctgtagtcccatgcttgccagctgccacagcagcagccagaataagactgcacctgttttccaaaatactgaatgtctctgtgttttatctctggaaataaaagtcatcatccggcattgcccctccgattgtctcaggattctgatccagaagggtttccagataaccggagagcattgtcttcatctcctggccttccacgaaggttatgctgcattccgggattgcttttactgccacttcttttgccacaatatcatgtgcatctatgatgacagaagctgcctccgcatcagaatttacaaaatccacagatgctttgtaggcatccaaaaatttatttaccttttcagggttctcctgtaaaaattcatttctcacaataatcacacctgtcacaaggcggcttccctcttcctgtgaagattcccacaaatcatttaaatccagtgccactctgaatcctttattcttcataagtgctgttgtgacaaagggctggggaagaagtcccacagccgtttggtctgccgcaagcgccgccaccacctcggcatgctctgatttatactcaatagtaacatctttccggggatctatgccattagctgaaagaacataattcagagcatattccggagtcgcccctttcccgctggcatatatggtttttcctttcagatcttctgcggtcttaacagcctccccattctccaccagatacaaaatgccaagggtatttactgccatcacacttacctgcttattggttttctgatacagcaccgaagacaggttggcagggactgccgctatatcaagctgcccctggacaatcaaaggtataatctcatcgggggatgccgcaatagaaaactcatactgcgtatcatccagcatctgtgccatacccatagctgtgggacccttgagtgcacctatccgtacaccagttctctctgaagtatctgctgtgttctccacagcctctttctcactgttgtcttccttttgctccgtctttttgctgttatcctcactttgggaggacttacctgtcccgcagccagacagcatgaacgcacatagacaaacagccagaaaaaagctgcaccattttttctttttcatatcattcctcttttcctacgaattgctattattttatcactttttcggaatttttccaagatgatatctatttatcactcattaatttcctgtatcatatatccccttacaatctcccgagagggaaatatgaccgccgccgttcttaccagcagattcacccctatcactccggcgataatccccgtgctcacactccctgtaggctgatcattattccccattggccggctcactatggccacaatggtaaatttctttttctcgtaccacgaattctcctccagaaaccgcagcaaagtactctcttcatggtgcctgccccgaaagcccgatatccctacgtttccagcataaacaaaagtccttctaacaaatcattatcctcttcaattaccagtatcttattcatagtcgcctccaaaataacatgaaaaggggacgaagaacaccccggttcccgtcccttacttgttatgctacaatattttgaggattccctgacaggaatccctgtatattgtcttttagaatctgtaccagccgttcccttgtctctaatcccttccatcccatatgaggggtgaggattacgttttccaggttatacaagggattgtcctctgcagggggttcggtctcctggacatccaggccggcacccgcaatcttctgctcctgaagcgcctgaatcaatgccttctcatctaccagagcacctctggaggtgttaatcaaaaatgccgacggcttcatcagttccagcgcctcctgattgatgatatgctttgtctgaggtgtcagcggacaatgcagagatacatagtcactgtttttcataacttcttcgaatgtggtataccgcacgccctcctcatccgtacccggcgttctggtgtagatcaggatgttcattcccaaagcttttccaatttttattacttcacgcccgatattaccggcaccgataatgcctaacgttttcccatttacttccacatggtctacctgcagacatttggtaaagttacacttatccccccgggccagcatactcatctgtttctgcatggatgaactgagattcagcagcatcattatcgctgtgtgggccacccggctggaactataggccggtatgttgcatacctgaattccctttgccctggcggcatccagatcgatattgttgtagcccgtgcctgcctcgcagataagagctacagactcgggaaactgttcaattatctccctcttcagaggcatctccttggtcacaacaatcctatgcccctgtattctctccagaatatccgcttcccgtgtatcctcatacacggttacctcacgggctaacacagaataatcgatcctgccgtcataatttaccttttccccgtttaaaactactaccttgtcgctcataattcttcccttcccgctccatttatattctgcatacactatctttattgtacttaagtataccacactttaatcggacaggaaagacttgagatagggaaggttaaccttctctgatattccggaatcctctccaggccatcccccagaacctgattccttacatattgtattccctcttcctccgtgaaccttacggtaagctcgtggctcattgccttatcattccccgtcattacacagactgcatccactgtcagggtaatcgtaccgtcttcattttctctcatatccgtaatctcaggctctgagttcccgaacgcatttggaatataattgccgcacccaagcctcacccacccatatctctgcccttccggatcataaaccgcatattgcttcagctgttctcctgtaaccggcaaatatttagaaagcaggctctcgaactcttctctggggatcccctctccatactggtccgaaggaaaacttttctgatattccataggatacaaatattgaaaaagcccgttataatccagctcttccatatgatcctcatcccaattggaacagaacagattatttccctggtatcctaccggtctcaaatattttgctgcaatctctctgtattcttcttttatgggcctgacccgtatggtagtattgccattcataatactgtctgtgatatccggcgcctccggcagctcatagctgaaccaccccttctcagtgtacacccaatcttttatccgggtataagaggtttcagaaatcaaaggggcatctgatttactccatgttgcattagtataccatacaaacatatgccttccgtcaaatctgaatttttttctgccgactcccccgtctgggtaaagctcatagagcgttacctccccctctttcccttttagcgaagaagacaaaaaactatccatggattcataattcttcatattatacccgaaccccagatcggctgtcgggcttcctaactctttcagctcttccagcatcagctcggctgtctctccacctatagctcctcctgaagttcccccacagccgttattaagatacgtttcctttactttttccattgcggtttggcattctgcctctgcctcctgcctgtctttctcctcaacaggaagatcataccccatttcctgatcctccgctgccccactatcttcagatgctgcttttttagattcagttgcctgaagggtttccggtttatgattctcttttccctggcagccccccagcagaagcagaccgataaggaacaccggatgccacaaagtcttgtaccctttcactgtgagctaacctcctttcccataattctttcatttctatcttccatcgtatgtctcccatttatcatctctcaatattgtaccctgtcttcctttgctgcatatcttatacattcctacacatgtaagatttccgtttgaatatatcagacactgctaaaagcataaacacctcccaataaatattacatctgtagtatttaaaaatcaagcatattcgatcattttttatctttcacccggatctccttttccgtagcctcgaatcatttctgttttcccgcgccctgaattcctgtatctgctctgcaatcaaattataatccctctcaaacagctcttcacttatctgcggtttcagaatctcagcagggatcttctcccctatcttttcaataacaaactttttgcttttctccttatactttgccatgccgttcagcttctggatatgggccagctccggccgccacagaagggataactgcttcttcaaactgacccctttatttgcctgcatcttgcgatacatgtagaaatcaacggaatggtctgcctcctcagcagttataattccccaccattcaggaacatgctccttaatatgtatcccatgagttgtgccagccacaacaatattataatcaaaaaaaagatcataatccttaacttgtcctgcaagtcttgcatacgtatctgcgtcacttttaatctcgatccccacaagtgctttttccataaccattacaatatcagccctggattttcctacttgcttttcttctaaaatccttatcttcccaaaataatcttccaaatagtcaaataaaggctctcttaaatccttatcatataacatacgttactccacccttatcttaccgctaaacaattctgtatgaggaaggtcttcatctgcatgatatatattaatatgatattcatccccgcttcggtttttaaaagcgggaaacaaaaatccggattccggtgcttccgcctcatattcaccgtggaccggacaaatcgcaccgatcagaaaggagtatatttcttctgactcccaaagagcttccttatcgtttgcttttaagggtacatcatatgccccaaaaaacagataaacggcatatggtctttctgatttatattgttcactgacataatcataaaaggtatccagcagagcatcattctttaattcacatgactttagtcccataaaaagctgccataaatcccctgaaccttttgcctcttcggtgaatccgtactcttttatgtttacatttgtattcgaaaataggattgcttttgcaatttgcagattggcggcttggtctgatggagacaattttaagaaattagtgttaaaagtaccgtctatataaccttcctcgtccatatacgccccggcaatcctgctaaaacagtttcttttcactgtcatacgccgggtaagctctagcatatcctctctgttaattttcttcattctgtcacttcaccctttctgcccattctattcgattatgtataaatgcattatagcgcggaagctcctccaaagctaccctttttgcttttccagcacttgggggaaacaaaaaagcttcagattcataagaacctgaagcttttcacttaagtgccgcagaccggaatcgaaccggtacgaagtttaaccctcgcaggattttaagtcctgtgcgtctgccagttccgccactgcggcatgtcctgatacaatcacggctcggacttttccgtgaaaatgggacctatagggctcgaacctatgaccctctgcttgtaaggcagatgctctcccagctgagctaagatcccataaacaaactgttagtaataacaacgacccagaagagactcgaactctcgacctccgccgtgacagggcggcgctctaaccaactgagccactgggccataaacctattaaattaatacaatggaccttcggggactcgaacccaggaccgaccggttatgagccggttgctctaaccaactgagctaaaggtccaaaataacatgtgtattattcacaagtccgagaagacctcgccaagtgtttcatacaagccgatgatcggactcgaaccgataacctgctgattacaaatcagctgctctgccaattgagccacatcggcaatagttattgccgacaatataactattatcttacataattagttatttgtcaagtgactccaaggggatttgaacccctgttaccgccgtgaaagggcggtgtcttaaccgcttgaccatggagccttctcgtttctttacagtaaaaaagctccccgagttgggctcgaaccaacaacccttcggttaacagccgaatgctctaccattgagctatcgaggattacttcttctttattaaaagtatttccataccttcaaaaccacatacacgattatacatctttttttttcactttgcaacacttttccgtaatacttagatttgccttttaccagttccggctcgacttgcgtctcacccgcctgttttttgcctttggctcggcttctctaagtcttcaggtcaagccctcgaccgattagtaacagtcagctccatgcattgctgcacttccacctctgccctatctacctcgtcgtcttcaaggggtcttacttcctttaaggaatgggatatctcatcttgaggggggcttcacgcttagatgccttcagcgtttatcccttcccgacttggctacccggccatgctcctggcggaacaaccggtacaccagtggtcagtccaacccggtcctctcgtactaaggtcagctcctctcaaatatcctacgcccacgccggatagggaccgaactgtctcacgacgttctgaacccagctcgcgtaccgctttaatgggcgaacagcccaacccttgggacctactacagccccaggatgcgatgagccgacatcgaggtgccaaaccactccgtcgatgtgaactcttgggagtgataagcctgttatccccagggtagcttttatccgttgagcgatggcaatcccactttataccaccggatcactaagtcctactttcgtacctgctccacccgtcggtgtcgcagtcaagctcccttctgcctttgcactcttcgaatggtttccgaccattctgagggaacctttgagcgcctccgataccctttcggaggcgaccgccccagtcaaactccccgcctgacattgtcccaccgccgggtcacggcggatggttagaaacccaatactgcaagggtggtatcccaacattgactccatggcaactggcgtcaccacttctttgtctcccacctatcctgtacatgcaataccgaatcccagtatcaagctggagtaaagctccatggggtctttccgtcctggcgcaggtaaccagcatcttcactggtacttcaatttcaccggatgcattgtcgagacagtgctcaaatcattacgcctttcgtgcgggtcggaacttacccgacaaggaatttcgctaccttaggaccgttatagttacggccgccgtttactggggcttaagttcaaagcttcgacttgcgtctaacctctccccttaaccttccagcaccgggcaggcgtcagcccatatacctcacctttcggttttgcatagacctgtgtttttgctaaacagttgcttgagcctattctctgcggccacatttctgtggcaccccttctcccgaagttacggggtcattttgccgagttccttaacaatgcttcttccgtcggccttaggattctctcctcatccacctgtgtcggtttacggtacgggtacaatataaacaatagcggcttttcttgacggccggctcatgggcttccctactttaattcggtccgcgtaacgccttcggattgttcagcggatttgcctgctaaactcctacttcgcttgcaccggattttccgtttccggctcccactttccttccgtgtccccacagttctgttatattgcagtacaggaatctcaacctgttgtccatcggctacggctttcgccctcgccttaggccccgacttacccagagcagatcagctttactctggaaaccttagatattcggccaaaaggattctcacctttttctcgctactcattccggcattctctcttcttaacactccacggctccttacggtaccgcttcgtcgcgttaacaatgctcctctaccaatcacttgcgtgattcctcagcttcggtgtcgtgtttcagccccggacattttcggcgcaggacctctcgactagtgagctattacgcactctttgaatgtatggctgcttctgagccaacatcctagttgtcttcgaaatcccacatccttttccacttaacacgcactttgggaccttagctggaggtctgggctctttccctttcgactgcccaacttatctcgtgcagtctgactcccgataatcaattacacggcattcggagtttgatattcttcggtaagctttgacgccccctaggaaattcagtgctctacctccgcaaatctctatcgaggctagccctaaagctatttcgaggagaaccagctatctccgggttcgattggaatttctcccctatccacacctcatcgccacccttttcaacggatgtgcgttcggtcctccactacctcttacggcagcttcaacctggacatggatagatcacccggtttcgggtctactctgactgacttttcgccctcttaagacttggtttcccttcggctccgcacctttggtgcttaaccttgccagccagcgtaactcgccggaccgttctacaaaaagtacgcggttcacctcatacgggtgttccacagcttgtaaacacagggtttcaggttctctttcactcccctcccggggttcttttcacctttccttcacagtactatgcgctatcggtcactaaggagtatttagccttggggggtggtccccccgacttcccacaaggtttctcgtgtctcgtggtactttggatcctgctcgctcttctcggctttcatgtacggggctttcaccctctctggccggctttcccaaagccgttccattaaccttaaagtcactttctgcagtccgtaaccccaggatgcacgcatcctggtttaggctctttccatttcgctcgccgctactttggaaatcgagttttctttcttttcctccgggtacttagatgtttcagttccccgggttcccttccatacgttatggattggcgtatggatggctggagtctgtccagccgggtttccccattcagatatctccggatcaatggatatttgctcctccccgaagcttttcgcagcttatcacgtctttcatcggctcttagtgccaaggcatccaccctgcgctctttgtcgcttgaccttcctgtttctatagcgttagaagcagacggtctgtgttgcttggttttctttctttgattccttatggtttcccataaggcctcggatgtctctatcttttacgtttaacgttttttagatatttttcgtatatgcggttttcaaggtacggacggcatccttcttctgaaacatgcctagtggagataaagagattcgaactctcgaccccctgcttgcaaggcaggtgctctcccaactgagctatatccccgtatggtacatattcaatatgtagatttgttatatatttgttttttcttggcttacgtggacctctcctgctatggtgaaaggtcatgggcttaagtggactcgaaccaccgacctcacgcttatcaggcgtgcgctctaaccagctgagctataagcccttttttaatctggcagccacctgctctcccacaccgtctccagtgcagtaccatcggccgcttaggtcttaaccatcgtgttcgggatgggtacgggtgtttcccctaaacgtatcgccaccagaagctttgagtacttggtgaggtactttcgaacctagtacgaaagctgttctttgcaacttggcgaggtcttttcgagcctagtgcaacagaacttcctcttaaaaaagctccctctaacagaacttcctcttcccttgataactcaacagtaaaacacattttccttacttcttcttttccttagaaaggaggtgatccagccgcaccttccgatacggctaccttgttacgacttcaccccagttatcggctccaccttcgacggctccttccctttcgggttcggtcaccggcttcgggcatatccgactcccatggtgtgacgggcggtgtgtacaagacccgggaacgtattcaccgcgacattctgattcgcgattactagcgattccagcttcatgtagtcgagttgcagactacaatccgaactgagacgttatttttgggatttgctccaggtcaccccttcgcctccctttgtttacgccattgtagcacgtgtgtagcccaaatcataaggggcatgatgatttgacgtcatccccaccttcctccaggttgtccctggcagtctccctagagtgcccagctctacctgctggctactaaggataagggttgcgctcgttgcgggacttaacccaacatctcacgacacgagctgacgacaaccatgcaccacctgtcttgcctgtcccgaaggaagggtcctgttacggaccggtcaggcagatgtcaagacttggtaaggttcttcgcgttgcttcgaattaaaccacatgctccaccgcttgtgcgggtccccgtcaattcctttgagtttcattcttgcgaacgtactccccaggtggaatacttattgcgtttgctgcggcaccgaacgcctttggcgcccgacacctagtattcatcgtttacggcgtggactaccagggtatctaatcctgtttgctccccacgctttcgagcctcaacgtcagttatcgtccagtaagccgccttcgccactggtgttcctcctaatatctacgcatttcaccgctacactaggaattccacttacctctccgacactctagctgcacagtttccaatgcagtcccggggttgagccccgggctttcacatcagacttgcactgccgtctacgctccctttacacccagtaaatccggataacgcttgccccttacgtattaccgcggctgctggcacgtaattagccggggcttcttagtcaggtaccgtcattttcttccctgctgatagaagtttacataccgaaatacttcttccttcacgcggcgtcgctgcatcagggtttcccccattgtgcaatattccccactgctgcctcccgtaggagtttgggccgtgtctcagtcccaatgtggccggtcaccctctcaggtcggctattgatcgtcgccttggtaggcctttaccccaccaactagctaatcaaacgcggatccatctcataccgccggagcttttcacactgtgccatgcagcactgtgcgcttatgcggtattagcagtcatttctaactgttatccccctgtatgaggcaggttatccacgcgttactcacccgtccgccactcagtcataaagtacttcttaccgaaataatccgttccttatgcttcgttcgacttgcatgtgttaagcacgccgccagcgttcatcctgagccaggatcaaactctctgataaaatgttgaactttcgttctcgagttgtccaagttcaaaattaactttggctaatttatcccttttactgtttttaaggatttttactcatcccaaaaatgttacttttttagaattttcaggttaatgtgtttcactgtttagttatcaaagtgctttgtacagtttgacaatgaatgctataattcttcgtcaaaaactgttaaattttgactgtttttctcagtcagctcaattatcttatcacgtttttcaacgtttgtcaacaaccttttacatctttttcccggtgtttttcagataatcaagaacggagaaggagggatttgaaccctcgcgccgctattaacgacctactccctttccaggggagccccttcagccagcttgggtacttctccaaaaccactgatatcttaatgctgctatataaaaaccgttcctcagtgaatccaacggttcaacggagagggtgggattcgaacccacgcgcccttgcggacaaacggttttcaagaccgcctcgttatgaccacttcgatacctctccatggtgtcgctttccgtcagcgacaagtgatattttaccattaatgtttaatgttgtcaatatgttattttcatattttttcaacaaaattttcagcaatcatcaggtcttccggtgttgtgattttgatgttttcataagagccttccaccagttttattctgcatccttttgtcttttcaacgaccatagcgtcatctgtaatcccctgcatgtctcctttccgcagctcctcgtgggcttcacgaatcagagaatagcgaaatacctgtggggtctgtattgtccacacataccttctgtcaggagtagcagcgatcattccttcttcatctgatatcttaatggtatcttttgagggcatacccaccacgcatgcctgaaaacacctggctccattcagagcacggttcagtatctcttcagtgataaagggacgggctccatcgtggataaatacataatcgcagccttcacatgccagcagtccctgatagacagaatcatatctttcttttcccccggcaatgatcttggagacctttgtaagcccatatttctgaacaatatccctcctgcaaaattctatggaatccacggaagcaaccaggataatgtcatccacccagtctgttttctgaaaacaggccagagaataatacaaaacaggattccctttaattagaagaaactgcttttgtattttactcctcatacgttttccctgtccggctgccagcacaattgccgtacatttttctctcttcattaccgttcccccagcttcaggttcggcactgcattcaaatcccatccgtgacgggttccttttttatactcgtagtaagcagccgtgccgatcatagctgcgttgtccgtacagaggatgggtgatgggtaataaaaatgaattccattctcctggcaggctttctccatccctctgcgcagtgccccgttggatgccacgccccctgcgatggccaatttgtccatatggtaatcctttgctgccgcaatcgcatgctccacaaggacttctactacagagcgctggaaggaagccgctatatctgctgccacaatctcctgcccctgcattctgcaacggttgagatgattcagcaccgcagattttacaccgctgaagctaaaatcgtaaggggcatcttcgattttaccctttgggaaatcaatggcatagggatttccctcacctgacaacttgtctatcttcggtccccccggatagccaagtcctatggctcttgccactttatcaaatgcttcccctgccgcatcgtctcttgttcttcccaggatctggaattctccatattctttcactatcaccagatgcgtgtgaccgcccgaaactacaagacacaaaaacggaggctccagttcaggatgttcaatgtaattagcagaaatatgtccctctatatggtgtacccctaccaacggcaggtttttggcgtagctgattgcctttgcctctgccacgccaaccaacaaagcccctaccagaccgggtccgtaagttactccaatggcatccatatcatccagggcagcccctgcctgatccagtgcctcctcgattacctggttaattttctctatatgctttctggatgctatctcgggcaccactccgccatacagcttatggagttctatctgggaagaaataacattggagaggatctgccttccgttttttacaactgctgccgccgtctcatcacaggaactctctatcgccagtatcactacatcatctatatttttatccattttcttcatccttattcttcaaattgcaaatctgttgattgcccgtcttttcccggataagaacggggaaaaatcgctctaacctcatccataaattcctcaggacggaccagagaggggctgtagtgtgtcagccacaattccttaacctcagcttcttttgccagacatgcagcctctttaaatgtcatatgcttatactcacgggcttttgcctctttctccttctccccgtacattccctcgcagataaaaagatcagactccctggcattctctctgatagaagcagtgggacgcgtatcggtcgtatacgtaagctttatcccttttctgggggaccccagaaccatatccggagtatatgtgttcccctcccaggttactgtctctcccttttgaagaggattccagcacttcagggggatccccagcgctccggccttttcgggaagaaatttcccgcctctttttatctccaaagtatatccgtagcaaaccacattgtggtttacgcgaaaggctgtgatctcatacccatggcttttcagatgctccacagactcggtaagttctatacactggatctcaaaaggaagttcaggggcgatcactctcagcgcagataccacacggttaagtccctttgggcctatgagtgtcagcggctccgtgcgctctgcgtttcccattgtcagaagcatccccggcagaccgctgatatgatctgcatggtaatgcgtaaaacaaatggtatcaataggtttaaaactccagcccttttcctttaccgccacttgggtgccttctccacagtcaatcatcaaattgcttccattataacgggtcatcaaagaggtcagccacctcctgggaagaggcatcatacccccggttcccagcaaacatatatctaacatgctatttcctcatttcattttcagtgttcttattctatcacaactcccagcgattggcaatgaggggccattttaaggatatttgacaggcagctctaaagtacgcacaataccataatcacaatcccgatacagcacataaggaatccaaaagacaagcttatggtcatccacttgtgggattccatccttcccctgagcctctccgccctggaaatcctggctgcctcctctgattctgtctgaagacgcagcggccggtaaagtgtttctttcagcgtgagaatgatgaagtcaaccaaacggtcaggtatgcgaaagattccggaacatacagagggcagccactttgtaagtgccgggacatagaccttcttttccaaatcaagccaatcgggccataagttcttatatccataacagccgggcgcctccctgaccataacagcctttttgataaaaaagaaatagacgaagcatcctaccgcaacagatattaccgcgcccttcagattcacgagagaaaaataggctatttcatgctccagaggatggacagcaaaaaatgtttccgtgctgtctgcaatccgatccatggttgcccccggcagtattcccaatacaggaattgcagtgccggaaagaaggagggttaattttgtcacgggatttgcatagtttcggtactgctcctcaaattctttctgcctcaccggatggcggtttctaaacagtgcataatagagttttatcatataagcaactgtcagtcccccacagaacagaaacaaaagttctacaaaggatgtaaaaccggcgcttcccaatacggtaccgccttcatggatatattctacgatactttcatgaagaagtgtcttgcttacatatccgctgaatagaggaattcctccgattcccagtgccccggacaaaaatgccaactgcaaaaagggttttctgcgcccgaagcctcttacctcgttcagttccaattcctccaggttcataaacaccactccggcagccaaaaacagtaccagtttaaacagagaatgattcatcatgtgaagcacaatgccgcgcactgccaactgattttcttcccccagaagtcctgccattcccaatccgattagcacaaacccaatctgggacatagaagagcaggcaagggtccgcttcagattcactgcaaatactgccaggactgcccccagcgtcatggtaaccatccccagcagaaggaccacagttccccagcggggatcatatcggaagatattgcaggaaactgaaagaattccaaacagacctacctttgtaagtatccccgacaggagcacactggccggcgcaggagataccgtatgtgcttttggcatccatacatgtaggggaaacattccggcctttgcaccgaatcccaagaggatcagcgcccctgctgtgtagatctgtccggagttctctgtccaggcttttctgcctgcttcatacaattcatctatccgcagcgttcccagcagatgatgcagcataaagagtcccatgagaaggatcagccctcccaccactgcaatgcccagataggtagacgccgcttccagcgcctggggcgtttcgttttgggccacccacacataagaggtaaaagacataatctcaaaaaagataaaggttgtatagagatctgcggaaagaaatacccccatggtggccccaagggtaaacaaaaggaacatataatatcggtttctgtttctctcatgcttcatatattcatttgacatcagcgctgacatcagccacaaaaacccagacaagagtccgaacagagcccgaaacccgtccagtacaaagcaaagccccaggctgcagattcctgccgcttcaaatatcaccgtctctccctgccacacctgcactgcaagagatgcgatcagaaaaagctcaagaaggatcgaaagatctaccgcataattccgcattcttttgctgaaccgcccggccagataccccagcagtgcagctgcaaagggccagcccaccgtaagtccaagtaaaatatttccctgcatcttttcacctcctatatagtaccggctgccacctgttccagaaaatccagaagcggcccgctgtgtactcccagtccgatcatcgcagcagcaaacacgcccagaggaatcagcatccgccaggtgggatccgctgtgtccccgccgatcagcctttccttccctctttccgggcaaaatgcacgtatgaccacagtaaacatgtaaatggcggccatcagcgcggcatagaacagaacaataaccactccgtagctcaaaagagtttctcccgcaaaggctgcctttgcaatccgccacttactgataaatccaatggtgagaggtattcccgtaagtgacatggcggataccgtaaaggtcaaaaatgtctttttcatctgatggcccacaccgtccagagccggaataaaatgatatcctgttttaaacataacagagcctgatacaaagaacgcacaaatcttgccgatggcatgagcaaccatatgacacatagctgcaatcatccccagagggctcataagtgttgcggccatcagaatataggacagattgctgatggtagagtaggccagccgccgtttaaaatgtacctctttcacagccatggtactgccgtataccacagtaaacatggcaattcccatcacaatgtcctgggcccagcttcctttgagtatctctgtcccgtaacagtaatacgtaaggcggagtaccgcgaagactccggcctttaccaccgcaaccgcatggagcagagcggtgaccggggtgggggccacagaagcagagatcagccatccatgaagcgggaataccgcagccttcactccaaaccccagaaaagccatcacatagataaggcgtagaatgttatcgtccaccagcgtgtgatccatcactcctccgatggcaaaggaagccccttccccgtacacagtaataaaaatcaggctggtaaaggcaaaagcagcccctccgatagaataataggcatactgcctgccggcacgcctggcccggggaatcatggtatgcatcacaagaggaatggtaaccagggtaagcagctcatagaaaagatacatggtcatcatattgcccgcataggcaatcccaaggctcaccccataggtcatggtataaaaagcaaaaaatgtattttctctggtctcatgggtcatgtactcaaaggcatacagagtagccaagggccagagtgtggaaacgatggtcccgaacagcattcccagaccgtcgatgcgaaagagcaggcttacatttttatatagttcaaaaaggattaggctctccttactgcccgcccacaaaatcccaagggaaattgcagaatttacaatgacaaggctttccactgcaatgttccttctctttctatcctttataggaaagaaaaataacagggccccggcgaggataggaagcagaataggtataatgatatagatattttccatgccgcacctcctataatatgctcttgccgatggcagtgagcagttccataagtcctcccggccatataccgaaatatgcaattccggcagtcaggattacaatggggagtaccatccacagagagggctcccgtttcttcagacttccgtagtcatacgcttttcccggcaggaacccgtgaatggtgatgggaagcagataccccgcagtcagcagagcgctgagcagcagaaccgcaggtgctatccagcgcaggacacctatctcagcctgcaaagcccccgccgccagataccatttgctgataaagcctgcaaacggaggaattcctatgagccctagagcagccagtgtaaagcaccatatggtcacaggcatctcttttccaattcctttaagctcagaaaccttcgtcttcccagtctggcagataattgccccggcaacggcaaaaagagcatttttaatcagagaatgaaaaaccacatgggaaagggcacccgccagcccgtaaaaattaagcagagaaagccctgccataatataagaaagctggctaactgttgaatatgcaaaccgcttcttcatcagcggttctctgtacgccatcatagaccccataaacacagtaatgagcgccaggatcagccaggcatactgcacccaggttcctttgatcacctcagctcccacaacaaaatagatcagccggacaatggccagcactccggcctttgtaatcacaccggacagtacagcactggctggcgccggtgctaccgggtgggcagtgggcagccatccgtgaaacggaaacatgccggcctttacaccgaagcccagaatcataagaaagattaccacataaaacacagggtctgactgggccgccgcctgaatattctgcgtcctgtcaggggaaaagtcacagagtatcccctttccaaacagatagataattccgaacaggccggcgaaagctccccccgcagaataaaataagtattttagccccgccattatggcctctttcctgagagtatgaaggactaagggcagggtggacagcgacatcatctcataaaatatgtatagggtgaccatattggcagagagatccagtccggtaagtactccacctgccatgaggtaccaggcataaaaggttccctccctctcttcctttctcatatagcccactgcaaatattcctgccagtgtccataccgcggccatgaataaagcaaacagcagagaaagcccatccgtgtgaagggcaatggatacaccgtccatcagctgccacagctgcaggtatcgatattccccctccccgagacatcggattcccagtagtatcgtaagccccccgtggaggactaaaaatgtcaaaaagtatcccagtagagctcttctgcttcccagatacttttgtaccgccagaagaagcccccctgcaagtacgggcagcaaaacaggcagtactaaaaaagtattttcacccataagtctcctccttttctactggaacatggcaatcccctgtttaatggcccctataaaaggtcctgaaaacaggcccaggataaaattgacggctgcaaatacggtaatggcggtacaaccggccgcccccagctttactcttcttgtcttttcagatgcagccaccggtgtatagataataataactgtgcggacaaaataaatagcgttcagcaatgtgctgattgcaataacaataaatacaaggacgacctttctgggatcctctgtggctgccactgcaaaagagatcttagatataaatccgccgaacaaaggaattcctaccagggaaaacgcgcctacggtaaagccgattcctgccagccggctcctgtatcccgcaccctttaattcctgtatacggtaggtatggccggaggcctgactcagaccctctgcgctgataaaaaggagcgatttcgtagctgcatgcaccaggatatgaaacattgccgctaccattcccgcccggcttcccagtccaattcccatatacacataaccaatttgagctaccgaggaataagcattcatataccggatgtccttttcccgtatggctcccacagaacccagaataatagcaaacacgctgaacgcaaagagtactttaatgatatcgctgcccagaattgtatccttgcccaccacccggtagatgatctttatcaggagaaatatataactctttgacaccagcccagacaaaatggcactggaggagggcagggaaaaaccataggcagccggcatccaggaatgaaagggatacaggccgctcttaatagccagaccagccgtgataagaataattaccataagcagggggatatgatactctcctctctgcatcagtatctttacgctttcctggatattgggcattagcagatgtccggtaactgtatacagaatacatactccgatgagaaaaagtccggaccccatcaaactcataatcatatatctggtagccgccacatacacaggacctgttttcctcaccataatcagaccgcaggcggctattgtattaatttctataaacacataggcggtaaaaatatcatttgtatagatcaatgccagaatcgccccaagcatcagattcaggaacaaaaaatacatgcccaggctcctgtcctccagctcccggctaagatgtctcatccctcccaggactgacagcagcatcacaaagctaaaaaaggtagctgttaaagcttccagaacacctacgcgtatctcatttccccagggggcggtataatgccccatggtatagacaaagctttctcctgtagacatcacataagctagagttgcggcagagagcacaatcacaatcccatttaccgcaattcccagattcctggcctttttcccttttaagacagatgaaatgacaccggagaacatggaaaccatgatggaaaaaaacggaaagttgcacacaaattccaattactcctcctccttcctcatcttcataatgatatagtccatattaagggaatggtatttctgatacagacagaccgtcagagcaagcatcagcgctgtcacgctcacagacaccacaattccagtgagtaccaggccgctggggatgggattaatgtaggcatccatgctggtgaccccgtctgtaacaatgggtgcccccctgccttcgatgtatccctgcgccgccagaaacaggtaagcagccgtgtccataatattaagcccaatgatcttttttattagatttttgtgcagcagaagagcagccagcccgatgccgaagagaatcacagaggtaacaacctctccattttccagaaagtgctccagcatctcagatccctcctttgctgaaaagtgcatagaacgaatacatggtacaagccacaacaatgcctactgcaatattcagaggcaggattagccctgcgctgaagatttcaccgggtgttcccagcggaatatggctgttcagatggttcgcacctgtaaaaaaggagtagcttttggcaagacagtaaaacccaagggcaatcagggtacagttctgaaacgtcttttctgtaaaaaactgttcgatggcttcatagccataggaattcctgaaaaggatcagacttcctcctatgattgcgcctcccgaaaatccccctcccggtgaaagatggccgttgagaatcacatagattccaaagagaaacagcataggcgacaggataaacgttactctctgcaggataacatcttccttcattcctatctctttctgggacttcgccgtcttcgcgccgtcgccggccttaagaaggaggagcaccgcagaagcggcgataaataaaacattggattccccaaatgtatcgaatgccctgtagtccaggatcattcctgcaacaatgttcacagcgcctgtctcttccatccctttttctatgtagcgccgggacacctcattgtttaccggattgtctgctgccccaaagggagggagaaaatataccacataaagcagagttcctactataaacacccccattagcactgtcagaatccggtatatataatgataggcctttgctttttcataggaatatccaacatccgggatctgttccagatatgcgagataattatgtcctgctttcttttcccgttcttccagggcaatgggttcaggctcttcgtaaaaaacatcattttccccggcaatccaacgctctagttttccgaaaaaggtatgctcgtaatctttcttaatcttactcatgcttttcgtcctctccaattgcccgaattcgtttgagggttacaaaaaataagacgctggttaccccggcgccgaccgcagcctccgtgatggcaagatccggggacttgagcaccacccataaaatggacataataacgctgtatgacataaaaatagctacagatatcaggagacgcctggccaggcaggcggaaagggcacatacaattaatccgaaaaacattacaaatttaaacgccgtcaacatccttcttcacctcttcctcttttttcatcagcgcattggttgtcacctcgaattcgcagagcatatggctgcacacaggacctgccatccagaaaaaagcaagtatgaacagcagctttacttcaacagtgccgccccactgatacagcatgaggccaatcaaaaggcagagtttccccagcgaatcccccatggcagccgcatgcatccggttaagagccgtgcggaaacgaaaattgccgatggctgccccaagcataatcaccaggccgctcagcataaatgcagcgcacagtacaaatctaattttctccccaatcatgttcttcctcgtcctccttctgtttttctgcatacacctttaaatataactgtaccagaacaaccacagccaaaaagctcagcatagcatagatgagacacacatccagcagataagactcttttagaagcatcgccagaatcgctattgccacaattgtaagagtaccgattgcattgaccgctataatccgatctgtgagcttcggccctataatggaacgaatgacataaatcagaataataactgccaggataatcaggcacaggataaaaagacctctgtaatactgttccatacttattcctccacttttttaataatcctgatcataagacattcgtctatcccctgagaaaagtctttgtccagacaatgtacagtaaaatcattcccgtccacatctaccgtaatggtccctggtgtcagcgtgatatagttagccatcataacccgtcctatatccgtcttaaagtccactgtaaaatgcaccagcacaggttccacctcatatttaaaagaaaaaataaatctcatgacactggctgttgcctttattacctccaggataagattacccagataccagcacacaactgggatttttttcaaaaaccggacatccctttttaagctgtaacccagatacctgcaggcgaaaataaataccagcagagaaatgacgattcccgctccaataatttctccggttatcttcccgtttaacacaatccagaataaaataaatataagtagcaatgatacacctccttgactatagagaaattatgattcgtttcattccagcgctgtactgcattaccagaaagtaaatgcggtacacaaataaattagggattctttcagtttcactccgagcggagcaagagaacaaggcaaaatatttacatattttccagactttgtctatattttatcatagtctttatgtattttcacgttatatttattataacattgtacttttttgtgcacaattccaattattcttaaggctattccatatttgaattgcctcatcccgttttcgtttatccggggcactccctctagaaagataatatcatgtaccattcttcccttcaaacctcaaaattggaagttttgtccgatagcatacacgaaaggtacacctgtattattttctgctgaaaatggacatattttcttattttgttttagtaagcgcaatatccccaggttccgtccgtttacgcaaaaaaaaatgccgcagtgtataaaatctcactgcggcactctttttgtcaaacctatagctgtatcaccagcgcttatctatcagggaggtactaaattaactccttttcctgccctttggccacaggaatctgaaagcctgcagtccaccgttcatagcaggattcacataagtcaaaggaatgacgctccccgtcacgactggaaaaatatccccatacaatatctacagggaaaaccccttccatcacaattccgttttccaccttcagttctcttccacacatgttgcaggacacctgctccagctgtttggcctgttggtttttgtatttcctcatctgtatcctccctttagaatccccttctgcgtttacaaatgtattatatcgaaaaaaaatacataaatatagtgggaacggttttcaaatttagcaaaagattacatttttctcatctcctgatcattacaattccgtcctccacaggggcttcataaaaattcctgcgggttcccaccctttggaaccccatactttcgtagagtgcgagtgcccgtacattactctttctgacctccagaaagcaggaggcaacccctgcctgttctgcctctgtgagaagctgctccaggagcatccgtccaatgccctttccctgttcacactgcgcaactgacacattggtaatctcgccttcgtccagagagatccacattcccgcatatcctacgaggcgtccatccttttccgcggcaagatacaaggtatcttttcgaaaagcgctggagtcaaagctctctctgctccaggggcgggaaaaattctccttttctatgtctgcagccgtacaagtgtctctgggctccattctgcgaatccgtatcatacctgtttctgtccctttaaccttgccgcccgttctctttccgcctgtgatacccgcagatattccggctggtgctctgctgcggactgtacctgtccactctgatacagcaccattcccagtgcccccacagatccggcccgctgcttattcacatgcgccggcgcgaaggaatagggaacctttatcttttcccgtatcagatctgcgtagaccgggacaccgtcccctaaaaagattacttcctgcccaagtgcattcagctcccccattagttcctcaacctttactgccttctgtcctgtgataatgttcatcttcccatcttcgaatctgtatatccctgtatacacctgacttcttctggcatccatcatagggcagattagctgtctggcatcgtagagattataagccagcgcatccactgtgggaaccccgattaacggtttatccagagcaagccccagccctttggcagtggcggcgcctatgcgcagtcccgtaaaggaccctggtcctgcagccacggcaatggcatccagggagttaagatccagttcgatcattttaccaatctcatccagcataggaagcagtgtctgagaatgtgtttttttatagtttatggtgtactctgccaagagcctgtcatcttccagtacagccacagaggccaccagcccggaactgtcaagagctaaaagtttcataatgaatccatcccttctattataatgcggcggtaatcaaagcctttttccagatctttctctatcgtaatctgcctgacatcctcaggaagaatctcttcaatcagattcgcccattctatgagacagattccgtttccgaaaaagtagtcatcatatccaatctcttccatctcctccacatccccgatgcggtagacgtcaaaatgataaaagggcagccttccgtcttcatattcctgaatgatggtaaaagtaggactgctgataggctctgtaattcccagaccctttgccactccctgtgtgaatactgtttttcccacaccaagatcacccatcaatgtgtaaatttctcccggacgggctctctgtccaatggtttcccccagccggaaggtttcctctgggctgtttgtttcatatatcataattatcctattcctatccgttttcacttagaatcctgtctgaatcatgtgattctgtacaattatagcacaaggctgcaccacactgcaatctcacatttctacaggaggcctcccgcacacctggtgaatcagtacttgcacctttctccatcccatattataataagttttacggcagtatgccaaatacgtaaaggaaaaggagtactatcttatggcaaatccagtagtaactattaccatggaaaacggggatgtgatgaaggcagagctatacccggaactcgcacccaatacagtaaataattttatcagccttgtaaagaaagggttctatgacggtctgatttttcaccgggtcatcaaaggttttatgatccagggcggatgcccggacggcaacggcatgggaggtcccggctataccataaaaggagagtttgcccagaatggattctccaatgatctgaagcatatacccggagtcctctccatggcccgcgccatgcatccggactccgccggttcccagttctttctgatgcacaagacttccccgcatctggacggggcgtatgccgcatttggaaaggtgacagaaggccttgatattgtagataagattgcagagacagataccgattacagcgacaagccgagagagccccaggtcattcagagtatgacagtggaaacctttggcgtcgactatccagaacctgaaaagtgctaatctctcagtcagagactgaaaaacgcttccgggaaaccaactgatgatggttccccggaagcgtttttcagtatttcataaaccctgacatcatacatcctccggccgccccggctgccagtacctctgccatattgcgcggggtaatcccgccgatggcgtacaccggcaggccggtggagtcacagacctcttttagatagcgcagacctctgggagggatcccttctttgcagttcgttgcatagatatgtcccgcaatgatataggaagcgcccagcgcttccgcctgccgggcttcctccgaagaatgcacagatactcccactgaggagaaatcccccagatactccctgtttttctccatttgggcaaatgctatctgaatgtccgggattttaagcctccgggcagcctggataaaatgattcaccgcaaagggctttcctgcatgacggcagatgtcccggcactgttctgccagactctcatagtcctcctgagccatatccttttccctgagaataattctttctatctccggaatccctgcaagactgtggatcctctgaagaaaatcctccccgcacagatgtctgttggtaatgcaaatcatggatttatactctgacatagtccacataaaccggctgcagtccccggtcaaggatggcctggttcacttcctccacatttctggggtctgaaatctcgaattgttcgtccccctttgcctcttccccgtgaccgcccacactcactttaaccccggctgatatctttgtggcacacataccgatgacatgatcccgaaaacctgcccgttccctggtagatatggtaattccggcaaacggcatgaatagccggtacgccagcattacctggagaagctgtgtttcgtggacatctttaggatttaccttgtcattatttatgatagggcgaagtctggggggagagaatgaaatctccccgtgaggatacttctgctggatatagcaggcgtgcagcccggtggcaaaggcgtcttttctaaagtcatccaatcccagaagggcaccgaaggctaccccgcgcattccaccttttaatgccctctcctgagcattgaagcgatagggaaagatcctcttgggaccgctcagatggagtcgttcgtacttttcgggctgatacgtctcctggtaaacgcagacatagtcggccccgcatgcatggagatatgcatattcgtcactattgagaggataaatctcaattcccaccagagcaaaatatttggccgccagtctgaccgcctctccgatataatctacgccggaggcatatcttgactcccctgtgagaatcagaatgtcctgcagcccggtggctgcaatgttcttcagctcccgttcgatctcctccatggacagtttccctctgtgaattctgtttttgcagttaaacccacagtaaacacagttattttcacagtaattggctatgtacagaggggtgaacagggaaacggaattaccaaaatgctttgccgtctcttctttgcctctttgcgccatctcttccaggtatggagccgccgccggagaaagcagggctgcaaaatcttctgtatccagagactcttttctcagcgcggccttcacctgggcaggtgtataacggttgtaatcatatgctgccgtttttttcagtactctgtccataagctgatggtctgtagcttccataccctcctgatattccatatgacaggtctgttctgttatcatatttaatcctccagaaagccggtcagagggctggatgctacggctttgtgttctactactcttcccagtcctgccaggtaggccatacggccagattctatggctagtttaaatgcagacgccatcagcgcagcatcgctggcagtggcgatagccgtattggccataattgcggcaactcccagctccatagcctcacatgcctgggaggggcgcccaataccggcgtccacaataataggaagctggatttcctccaccagaatcttgataaactctctggtacagagccccttattgcttccaataggtgctcccagaggcataatagccgctgccccggcgtttaccatatctcttgccgcattcaggtccggatacatataaggcataaccacaaatccttcctttgccaggatttctgttgctttaattgtttcgtaattatccggcaaaaggtatttgctgtcgtgcacaacttcaatctttacaaaatccccgcaccccagttctctggccagtctggcgatccggacagcctcctgtgcattccgggcgccggaggtattgggaagaagggtgattccctggggcatatagtccagtatattctcttctccccccacattggctctgcggatggccagggtagccatttccacacctccgttttttattactgcatctgtcatctccagtgagaactttccggatcccagtataaatctggaccgaaattcatgtcctcctattattaacttgtcaatcatcttacctttctcctattcctcatgtaattccaacagcagccgcaggaccatatttgcctgatgacccgcacatatctgtactcttggggccataagtccctggccgggggctgccccgcttgtctgatccccgcagagaaaataacgctccatccttttttctgtatgtatggcattggcgctggcgtatcctgccatacccgaagccccgaccaaataggtgccgggaagtttttctaagatggctgcggtaaactctgcttttgtctccggggcatcaaaggcctcacagataacctgacatccctgaaatatgccttttgcattttcagcatcgatcttcacgtctattgtctccacctctatatatggatttatctgcccaatctgcattttcaaagcctctgtctttttcattcccagatgggatatcatgtaattctgccggttcagattgctgggttccaccacatcaaaatccaccagcagaagatgtcccaccccggtgcgggccagcataactgcaatatgggaacccaatcctccaagacctgcgattcccactcttccttttttcacctttcggtggactcccggggtatgccgggccgccatcatggtctcaagctccccgggctttggcatactgcctctggagacaaaaaaaatctcatccccgggctgcacagagtacacccccgaggtgcagtatccatttacaatggttatgtcatccgctctgcccaactccttttgaagctgctccagcgtacaggcgggaagctctctctcttccccattcagaaccactctcatggatcaacctccgcccacaaagcttacaatctcaagagtgtcagcttcggtgagcactacctcaccgtatctgctcttggatatgatttcatggtttctctctaccgcaattctatccaatggatatttgtgttcccgtaagaacatttccagtgttatcctctcctcaagggctacgtcttttccgttcactctcatccggcctctctcctatctctcagaacagaattccacttttttgccttccagtatcatgttagtggtgcgtacagcacacatcttcccgcacatggaacaggtatgtctgtctgcagggggggtgctctcaaagtactctctggccttctctttgtcaattgccagggcaaacatctcttcccagtccatcttatgtcttgccgctgccatcttgtcatccgcggttctggccccttttatcccctttgcaatatctgctgcatgtgctgcgatcctgctcgccacaattccttctctcacatcatttacatccggcagacgcaggtgctctgcaggagttacataacagaggaagtccgcaccgctggcggctgctatagctcccccgatggcggaagtaatgtgatcataccctggtgcaatatccgtcaccagaggaccaagcacatagaaaggagcattgtgacacagacgtttttgtatcttcatattcgcggcaatctcatccatagccatatgtccgggcccctctaccagtacctgtacatccttttcccaggcccttctggtgagatccccgatttcaatcaactctgcaatctgtcccgcatccgatccgtcctccagacatcccggccggagagcatccccaaggctgatggtgacatcatgttctctcaaaatctccagcacctggtcataatactcaaagaaaggattttcattgcctgtcatctccatccatgcaaagagaagagaacctcccctggaaacaatattcatctttctgccctcccggcggaaactctccacagccctgcggttcaggcccgcatgaatggtgacaaagtccacgccctctctggcatgggcctccaccacgctcagaaaatcctgtgctgagatctccagcaaatctttgtccagatacccgatggcatcatacataggcaccgtccctatcatggcagtagatttttcgatgagtttttctctgaaatcatgggtttttccgtaattgctcagatccataatggattccacgccaaaatccagcgccatatccaccttcttcatctcccgctcatagtccttgctgtctcctgagattcccagattaacattaatctttgtccggagtccggcgccaaccccttccggagacagagaagtatggtggatattagaaggcactgccacctccccagacgccatttttcccataagctccctcagatccatttgttctttttcagccactgctttcatctgcggagttacaattccttttttcgccgcttccatctgcgtgtaatattcgcgcattatcctatcctcctttatgtatttcttgaatagcaaatgcgccagaacacgtttccaaacggacacaaaaaaggcaggtatattactacctgccagtccattgggtctttataaaataaaaaaagttcactaataactgtgaacattctgccttttactaaattccgaatgctccctaccacagtgttaactgtcaggttcaaagggttagacagcctcttctgtcattctcaactacacttagttcccctgcatcgctattcaattggtttcattataatcatgagtccatccgttgtcaatcatttctcaaaaaaaaatatcctattccggaagaaggcgggctacgccatcccctcccagatcttttccattctggcctgcccgcttgtagcctctgtaatctcatacttcagttcctcagccatttcaaaggggacctgtacctgaagccgcacctgttccgtatattcagcatccttcacaggcagtcctctctgccccagcaggtattgaattttcccgatcccattgtagtccgtcgcaatctccagaagtatgacatgacgctttatcaccacactgctgtttttcaatccctcctgcactgctttggaatatgctcttaccaggccgccggtacccagcagggttcccccaaagtatctggtgactaccactgccgtatcgtgaagctcctcccccagaagcacatccagcataggctttccagcagtctggctgggctccccgtcatcgctgcagcgcatagtttccccgtgcgctccgatgacataagcataacaattgtgggaggcattccagtatttttttctcatctcctcaagaaaagacagcgcttcttcttctgatttcaccgggcgaactgtagctataaatcttgattttttctctacaatctctccctctcccccaatttccacgattttatattcgtttcgcataatattcgtatcctctttatagttttgtagtatcttcgcctttattttaacatgtttcttaaggatttgggaagcaattgtgaagtttttaattggggctttatttcacaattctcttttgttataatggatgggaaaaggaggcaacattcatgaactttggaaaaagagcgacttccaagaaacgcaatgccctaacctcccgttccactatggtaggtaacaaagcacacgtttctttccttcgggttatatttgcatctctgattgcagtttttgtcctgtgcgcctgtacaggcttcggtgctgtgaggggtctgattgacaatgcccctgagatttccgatgtaaatattatgcccattggtgctgctaccttcgtgtatgatacagagggcaatcagattcagaaattaactgcacccaattcgaatcgtatgcctgtgaccattgaccagattcctctggatctgcaacacgccgtagttgctattgaggatgaacggttttatgagcataacggaatcgatatccgcggtattatccgtgcaggtgttaagggtatcactacaggccacttttctgagggcgccagtacaattacccagcagttattaaagaataacgtattcaccggctggacacacgagtcaacggtagaaagattcaaaagaaaattccaggaacagtaccttgccatccagcttgagaaacagctgaaggataaaaatgtaattctggaaaactatttaaacacaattaacctgggcgctggtacctacggggtacaggcggcatctcaccgatattttgataaagatgtacaagacctgaccttgtctgaatgcacggttttggcaggtattacacaaaatccgaccaagtacaatccaatcacgcatcctgaggacaatgcagagcgccggcaaaaagtactgaaaaacatgctggaacagggttatatcacccaggaacagcacgatgaggtactggctgacaatgtttacgagagaattcagcagacagaggcagagacagcagacgataactctgtatacagctattatatcgatgaattgaccaagcaggtgatccaggatctgcaggatcagaagggttatacctcccagcaggcatacaatgctctgtacagcggcggtcttcagatctactgtacacaggaccagaatatacagcagatctgcgatgaggaataccaggaccctgataatttcccgtccgggtcacaggtgagtctggactatgcccttaccctcaagcatcctaacggagaagaggagaattacagcaaagaaatgatgaaagcctacttccaggaatcagattctgactttacactcctctttgacagcgaagaagatgcccagccctatattgactcatacaaagagcatcttatggccgatggcagtacagtggtagctgaaaaggcaatctacacaccccagccccagtcttcgctggtagtaatggatcagcatacaggatatgtaaaagcactggttggaggcagaggggagaaaactgccagcctgacactgaaccgggccactaatacacttaggcagccaggttctaccttcaaaatagtatccacctatgcccctgctctggacgtctgtgacaagacactggcgagcacttatgaggatgaaccgtttgaatatgagggaggccgtccggtcaagaactggctgaccaattcctacgggggaaccactaccatacgggatgctatcattaattctgtcaacgtggtggcagtcaaatgtctaacagaaatcaccccggaactgggttatgagtatctgaaaaaattcggatttactactatttatgactacaaggaaattaacggcaagatatacagcgatgtccggcagcctctggcacttggaggtatcacccttggtgtgagcaatcttgagctgaccgctgcctacgccgccattgccaacgagggtacctataccaaaccaattttctacactaagattctggacagcgacggaaataccgtcattgacaatacacctgagaccacatctgtaatcaagccaagcactgcttatcttctcacaagtgcgatggaagacgtggtcaaagagggtacaggtacgcgtttaaaattatccggtatgcctgtagcaggtaaaacaggtaccacctccggttataacgatgtttggtttgcaggctatacgccttactatacctgcgcggtatgggcaggctatgatgataatgagaagcttccgaaatccggaatctacaggtcctatcaccagactttatggaaaaaaattatgggcagaattcatgaggatctgaaagaaaaagattttgagatgccctccacggtggagaaagaaacggtatgtgctactaccgggcttcgtccaaatgccggatgcccgactatcacagaatatttcgataagacaacacttcccaccaagcggtgcaacaagcacagcaattaccggagaagcgacgactcagaatccaataatgaatcttccggcagcaatcagagggaggaaaacacgaataacaccactcctccaaccaccggagagaatcctaacggcaataatacaaacaataaccagccggaaaatcctaacggcaataccggggatcagcccggaggcaacaccggacagccgggtactccggaagagccgacaacgcccacaccgcccgtagaaggcggagatcagcccggaggcaataccggggatcagccaggcggggataccccacagccgggcacctgacagagcataagatcacataaggacattgcgcttacaagcgcaatgtcctttgttttctcgtatcccccgcatggggctgcaagacgcccaaattgcaggatacaaatccagagagaaattggggccgggtagatatcacaatcagctccccacagcatccagtatcagctttgcggctcccacaatacccgcatcatttcccagctttgccaaaaccagcggagtgtccctgcaggcactgaaggcatattttttataactcttttcaacagcctgtatcaatacatcccctgcctttgaaacacctcccccgataacaatgacctcagggtctactacacaggaaaaattacccagtgcccgtcccaggcagtcggcaaagacagagactatatctgccgccagctggtctccctctttataggcgtcaaagactgctttggcagtaatctcttgtccccgaagtacagacattttttctgattgggcaagcatcctgcgggcgatcctggcgattcccgtagccgacgcggtctgttccagacacccgtggccgccgcagttgcacgcttcttcttcgttgggatccacacaggcatgcccaatctcccctcctgcaccgtgggcacctgccacgatcctgccgtttacgataattcctccgccaacaccagttccgagagtaaccagaatcatgtttctggctccttcaccgccgcccttccacatctctcccagggcagccacattggcatcatttgccgctttgacagggtatccggaaagagtcctcaattcttcctctatacacttttgtccccaatggagattaaccgcacagggaatctcccctttttcattcaccggtccggggacaccgattcctataccagccacatcctttgcagggatggaagcatcctttgcctttcgaagaatggactctgccacatcgggcagtatgtgcattcccccttcctctacacgggtcttaatctcccatttgtccagtaccttcccactggtgtcaaataggccgcactttattgtagtaccgcctacgtcaattccaaagcaatactgtgccatacattaatcctccctctttttcgcaatattctcctgtacccgcttgtacagttcctttgccgcattatatcccatctttttctgtctgtggtttactgcagcagattcaactatcacagcgagatttcttcccggacggataggaagagaatggcacactaccttattgcccaggaattctgtatattcttcctccagcccgagtctgtcatactctttatccttactccattcctccagcttaattaccagatcaatggcctgggtatcctttacactctctacgccgaacagggtttttacatctataattccaattcccctcagctcaataaaatgcctggtaatatccggagccgaacctaccagtgtcacatcgctgacacgccgaatctccacaacatcgtcacttaccagacggtgtcctcttttaatcagctccagagcagcctcgctcttacctatcccgctctcacccatgatgagaacgccctctccgtacacatctacaagcacaccgtggacagagatacaaggcgcaagctgaacattcagccagcggataatctccgccataaaattagaggttgtcttatctaccgttaaggtaggtacctgatacttttcagccagccggagcatatcctcatccggatgtgtcatcgtgctgaaaaccacacagggaattttgctggacacaaacctttcataggcggcgactttttcttcccgggtaagatgctgaagatatgtgtattccacgtatccgataatctgtaccctttcattctcaaaatgctccagataacctgtcagctgaagtgccggccggttaatatccggaagggtaatccttatctcagacatatcaatatcaggggttgcattataaagccccagctcctgcaccattttcttaagttctacacctttcatatgtgctctcctttgcgatttcttagattttattctaccacatacgatctttcacttcaacaaatccatctgctaatcttccccttcatgaaaaaatgcatacacctggcgtgcacttcttgcattcatagacggcaccttttccagctcctctaaggatgcctccctgataggttccagccccttgaaatacttcatcagcgcctttctgcgggcaggccctactccctcaatatcatccaagacagagtgaacctgccccttgcttctcagcgaccggtgatattcaatggcgaaccgatgggcttcatcctggattctggtaatcagtttgaacccttcgctggaccggtcaattggaatctctgcattattgaaatacagcccccttgtcctgtgtttgtcatcttttaccattccgcataccgggatctccagacccaggcggttcagaacatccagggcaatatttacctgtccttttcccccgtccatcataagcaaatccggaaatttagtaaagcttccgtattcccgttccagatttttctccctctgttcttcctgttcatccatcccatgggtaaaccggcgggtaagtacctcttccatactggcataatcgttggcgcccttcacccatttgattttaaatttcctgtaatcactgcgttttggttttcctttttcatagacaatcatagagcccacagactgaaatccgctgatattagagatatcaaaagcttctatccggtttacatcctgaagtcccagccattgggagatctctttgactgcccctatggttcttccctcttcccgctttatcttttcccgatcctggcttaaaacaagctgggcattctgggccgccagctccaccaacttttcctttgtcccctttttgggcactttcagtcttaccttctggcccctccgtttgccgagccattcttctatgatttcctgatcctctatctcttcctgaagcataatttccttcggaatatatggcgtacctgcataaaactgtttcagaaagctggagaccaccaaagctctgccgtcaccttctgccactttaatataaaagtgatctcttccgattagacgtccgtccctgacaaagaatacctgggccaccgcgtcctctccgtccatagccacagcgattacatccttgtcgtctccatgctgatccgtaatcttctgacgctcctgaatccttcctacgctttggatcagatcacggtactgggcagcgtcctcaaagttcatctcttctgccgcctgcttcatcttttcttccagctcccggattaccggcttactgttccctaccagaaaatccagaagcttctctacctgtttatgatattcctccttagaaatatagccctggcagggggctttgcactgtttaatatggtaatacaggcagggacgttcctttccgatatccttggggagattccggttgcaggacctcagatgataaagctttctggaaagctccactgcatccttcaccgcacctgcactggtataggggccataataccggcatttatcctttttcatctggtgagagaaaagtacccggggaaactcttcgttcacggtcaccttgataaagggatatcccttatcatccttaagcatagtgttatatttaggccggtgctctttgatgagattacactccaggaccagcgcctccagctctgaatctgtaataatatactcaaaacgctcaatctgcgtgaccatacgctcaattttagcgcctttgttcctgcttgactgaaaatactgccgcacccggtttttcagactgatggcttttcccacatatataattgcatctttcttatcatgcatgatatagacgccgggctttgccggcagtttttttaattcctcttccaaatccatactgctctcctctatctgcctgaaaggcctgcttcccggaggacactgcccggggaaccaggttattctcctgccgaaatatatttatctgtaaatgaaaatacggttccgtaatatgcctccggatccttgtcctgagactgggcatgccctgcaccctctacgattaacaattctttttcccctccagcagcctgatacagctcttccgccatttctgcaggtataaatgcatcttcgttcccgtgtataaacaacaccggcaggctggtttttttgacctgctccagagcagacgcttcctttatgttgtagcctccccgcatctgcagaaccacattggctgcatccagaaggggaaacggcggaaggtgaaaccattccctgagctgtttcttaaagatgctgtacacatccgtgtatgcacagtcagagaccactgcctttacattgtcgggcatcttctcccccgccatcatcagtgcacaggaggcccccatagactgtccgtgaatcactatctctgcctgaggatcctgactcaatatgtaacggatccatatcatattatccgccctgtccgtccatcccataccgataaaatcaccttcgctctctccatggcatcgcatatccggcgtgagtacctgatatccttttaaggcatattcgcaggctatgggattcatctcctctttccagccggtgtacccatgaagcaggagcacccacttatggctcttctccttttgataaaatactctggccttcagtttatagccgtccgccgactctgcctctagctctgcctggggtgcagccgacagccacacctccgttttaccggaagctttggagcggttttcctgtatatcatctgtgtgcaccagtgccgctacactctcttccgtaatatcctcaaacgcctgggtcttttccatagaagccggcaccagagccacatccacaagtatatacgctgccgcaaaaagtaatacaaggagaaccgcaaatactattcctattctctttatccactttttcttcattttgactctctcttaagtcctttctcctctgcccggtgccttacttttatctcatcttgacgcctgggcggtactgctaccgacatttagagccggaacatatatgctccggctcttatgatattttagtcttctgtgattgtctctttttcctctgagttcgggatatcttcctgtctgacctcctgcgcctggtccagagaagcctctggctgttcttcttctgcaggctccaagagctctggcaagacaggctccttatttgtcgttatctccgaatccggtgtttctacgttctctttactttctctctggaggatacggtactccttattctcttccccttcaggttcaggaatacccttgacctcccggaaaatcttcatgaactctttccctgttatggtttctttctcaatcaggaattccgcaattttatccattacctcccggttctccgccagcaggccttttgcctcatcgtaagactttttaagaagctccattacctcatggtcaatttccgtggcagtggcatctccgcagttcagaaccgcccttccgtccagatattggctctgtacgtctgcaagtcccataagtccgaatctttcggacattccatattgggtaatcattgcccttgccacctttgtggcctgctcaatatcattggacgccccggtagtcacagtatcaaaaaccagttcctccgcggcacggcctgccagatatccgaccagcatagcctccagctctttcttggtgttcagatacttttcctcctccggtacatgcataacataccctagagcccccatggtacgaggcacaatggtaatcttctgcaccggttctgaatgcttttgcagagcgcttacaagcgcatgacctacttcgtggtaagagacaatctttcgttcctccttgctgaggattctgtcctttttctcttttcctacaagcaccacttccactgcttcaaataaatccttctgagataccgcacgccttccctttttaactgccagaatagccgcctcattaatcatattcgccaggtcggaaccaaccgcccctgaggtagccagagcaatagcatccaaatctacggtttcatccaatgccacattctttgcatgtactttcaggatatcaacccgtcctttcaagtccggacggtctacaattactcgtcggtcaaaacgtcccggacgcagaagcgcaggatcaagtacctccggacgattggttgcagccagtatcaaaagccctttggacgtgtcaaaaccatccatctcagccaaaagctggttcagggtctgctcccgctcgtcatttccgcctccgtaacggctgtcacggcttttaccgatggcgtccacctcatcaataaaaatgatgcagggagcgttcttctttgcctcctcaaacaagtcacggacacgggaagctcccactcccacgaacatttccacaaagtcagaacctgacagtgagaaaaacggaacgtgtgcctccccggctactgcctttgccagcagtgtcttaccggtacccggaggtcccacaagaagggcgcccttgggaagctttgccccgatagccgtatattttcccggattatggagaaaatctactacttcctggagagattctttcgcctcgtcctgccccgccacatccttgaacgtaacgcctgtctccttctgcacatatgcttttgctttactctttcctacgccgcccatcatgccgccgcctttgttcatccggcgcatgaagaagttaagtacgagcaataataatacaaaaggaatgataaagctcaggatactgtacagtatggtagatgccggatccgggggcttcttggaaaactccgcatcgcattttgccagacgttccgtaagagctgtttcatcttccatcaaagtcgtgtagtaggtaacctcaaggttaggattcgactgcttcttgggaatgatggtcagagtgtctgatttcaattgtactttgctgatctcgtttttatccaccatagaaataaactcattatatgagatttctctggaggtgagatccttctgcatgctgccgaagaaactcatacatgccaaactaataagaatacaaatcaggagcatcagcaacgtctgtctattcttcggtccgcctggtccgttattcctgttatttttaggattctgattattattttggtccatttccttcctcctcattcttgtctcttctattataaggacagaccggctataaatcaataaccagattgtgaaaaagaagacacttttcttaaacttttctaaaatccaatgaaaatcgacatctattttttccgtaatgggtagaaaaaacaatctaacctgtagtatactaaaatctgaggcatttatgcctgctacttttataatatcttagggagacagaggttaaaaaagcaaatgaaaattggatttgataaccaaaaatacctggatatgcagtctgcacatatccgtgaaagaattaatcagtttgacaacaaattatatctggaattcggcggaaagctttttgatgactatcatgccgccagagtccttcccggttttgcacctgacagcaagctccgcctgctgatgcagctctcagaccaggcggaactggtgattgtgataagcgccggggatattgagaaaaataaaatcaggggggatttaggaattacctatgattccgatgtgctgcgcctgatggatgccttcaaagaaaaaggcctgtatgtgggcagcgttgtaatcacccagtatcaggggcagaacagcgccaatctcttcaagatgcgtctggagaagctgggtattcgggtatatatccactattctattgagggctatccaagtaatataccgttaatcgtaagtgacgacgggtacggcaaaaatgaatatatcgagactacccgtcctctggtagtcatcactgccccaggtccgggaagcggtaagatggcgacctgcctgtcccagctctatcacgagcacaaacggggcatccatgcaggatacgccaagtttgagacctttcccatctggaacattcctctgaagcatcctgtgaatatggcctatgaggctgcaactgcggatctcaatgacgtcaatatgattgatcccttccatctggaagcttacaataaaacagccgttaattataacagggatgtagaaatttttcctgtactcaacgccatatttgaaaaaatttacggttccagtccctacaagtcccccacggacatgggcgtcaatatggccggaaactgcatttccgacgatgaggtctgcagggaagcctcctgccaggaaattatccggcgctattatcaggctttgaacggtctggctgacggcacccgtctggaagaagaagcctttaaaatcgagcttcttatgaaacaggcccatattaccacggatgacagaaaagtggtggctgtggccgtggaacacgcaaaggaaactggtgcacctgctgccgccctggagctggccgacggacgcatcatcactggtaagacttctaatcttctgggggcttccgctgctcttctgctgaatgtgctaaaagaactggccggcattgatcataaggttcacgtgatttcccctgctgccatagaacccattcaaaagcttaagacaaaatatctgggaagccggaacccccgccttcataccgacgaagtccttatcgccctgtccatcagtgcggcgactgattccaatgcagagctggcattagagcagcttccaaagttaaaggactgccaggcccatacttccgttatgttgtcggatgtagatttaaaagaatttaaaaagctgtctgtgcagctgacttcagaggcaaaatacgagaacaaacggatctaccactaaaactaccagaaagcagcagcgttttggtaattgtctgactttaatttttttaccaaaagcacttgttttttcctgcacatgtgttgtataattttttccgttattttaaaatttaaaagcattcactaggacaatggagtcccggcaatttgctgaaacagccgttcatctgcgagggcagcatgacaggcttttcagctgccgggacttctctgattgaaagccccaaaggggccgtcttccaaaggagggaaatcatgccagtaaagtacgtatttgtaaccggcggggtagtatccggtctgggaaaaggaatcactgcagcatctctgggacgtctgctgaaagcccggggctacaaagtcaccatgcagaaatttgatccttacattaatatggatccgggaactatgaatcccatgcagcacggggaggtttttgtcaccgatgacggtgcggagactgatttggatctgggccactacgaacgttttattgacgagagtctggataaaaattccaacgtgacaacaggtaagatctattggtccgtcctgcagaaagaacgccggggggatttcgggggcggcacggtccaggtaattccccacattaccaatgaaatcaaaagcaggttttaccgcaattatacctctgaagagaccagaattgctatcattgaagtgggcggcacggtgggggacattgaaagccagccttttctggaggcaatccggcagtttcagcacgatgtggggcgggagaatgccatcctaatccacgtcactctgattccgtatctgaaggcttccggcgagatgaaaacgaaacccacgcaggccagtgttaaagagcttcagggtatgggaatccgccctgacattatcgtctgccgctccgaacgtccgctggaccagggaattaaagataaaattgccctgttctgcaacgttccaagcagtcatgtcctgcaaaatctggatgtagaatacctatacgaagctccccttgccatggaaagagaaaatctggcgcaggtggcctgcgagtgcctcaatctggagtgtccccagccggatctcgctgactggaaaggaatggttgaggctctgcgccatcccaccaaggaagtcaccatcgccctggtgggaaaatacatccagctccacgatgcctacctcagtgtggtagaagccctcaagcatggaggaatcgccagtcacgccaccataaatctgaaatgggtggattccgaggaaattacgcccgaaaatgcagaagcctttctatccgaagcggacggaatcctggttcccgggggctttggagaccggggtgttgagggcaaaatcacggcaatccgctatgccagagaacacaaggtaccgtttctgggcctctgcctgggcatgcagctgtccatcgtggaatatgcccgcaatgtggcgggctattcagacgcacacagcatagaactggatcccaatacagtacatcctgtcatagacttaatgccggatcagaatgggattgaggacatcggcggtacactccgtctgggggcttatccctgtgtcctggacaaatcctcaaaagcctttgagctttacggggaagaaaccatatatgaacgccaccgccaccgctatgaggtgaataacgattaccggagcgaattgaccaaatacgggatgaccctctccggtatctccccggacggcagaattgtcgagatgatagagctgaaagatcaccccttctttctcgggacccaggctcatccggaactgaaatcccggcccaacaggccccatcccttattccgcgggtttgttgaggcgtctgtggacagaaaggagcagaaaccgtaatattctttgccggatatgcaaaagacgccggggaacagaagtttaccttctgcccaggcgtcttatagtttctttttatctgtatccgtcaggattcattgactgccatttccaggaatcccggcacatttcttcgattcctctcttggcctcccagcccagttcttctttggcttttgcggcgtctgcatagcaggtaggaatatcgccggcacgccttggcttaatctgatacggtattttcttaccgcaggctttttcataagccttcaccacatccagtacgctgtacccgattccggttcccagattgtatatcatgactcctttagcagtttccagcttctggattgcctttacatggcctgctgccagatcaaccacatgaatatagtctcttacccctgttccgtccggtgtgggatagtcatctccgaagacacccagacattccagtttgcccacagccacctgagcaatgtaaggtaccaggttgttgggaattcccttgggatcttcaccgataaggccgctttcatgggccccgatcggattaaaataccggagcagaattacattccattccggatcgcctacatgcaggtccgtgagaatttgttccagcattcctttggtctgcccgtatggattggtgatcttacccttggggcactcttctgttatgggaacaaatgcaggatcgccgtatacagtagcggaggagctgaagacaatattcttacagccgtggtttctcattacatcgcacagcagcagggttccagtaatattattgtgataatattccagaggcttggacacggattctcccaccgcttttagtcctgcaaaatggatgacagaatcaattgattcactgtcaaaaactgcttcaatatccgggcggttcagcaaatcgccttcataaaatttaactttttttcctgtgatttgctccactctgtcaagagcttttgcactggaattataaagattatccatcacaactacttcgtacccctgattcaacagctctacgcaagtatgacttccgatatagcctgcaccgccggttactaatattgccataataaactcctccttcatctgcagttttatagattgtctcttaatttcttactcattctatcacggataggtaagaataacaactgaatccgaatatttattttattaaatttgttttaaaacatttatactgtttttatttttgcatagtttgctataatctcgtacatctgctgctttttctgttccatatctgccaccagtttaaactgcgtcctgcagcggtccagattttgtccctctctgtgcgtcttaaagtacgtatccccggacagataatctgtcagaaaccggatgccgcattcataagtcatggtaatagcaccatccggcagcatgcatatctcctcctgagtgagactccctccgcacccttccaggaaccctttggtgtaagcctcaaaaagctccagactgcaccaaattttcgagagatcccgctcgtcctctgcaccagtgctggcaccaaaacggatagaatccccaaaatcattcactgccagtcccggcataacagtatccagatcaatcacacagattccttttcctgtagcgttgtccatcataatgttattcagttttgtatcgttatgggtaacacgcagggggagctccctgcttttctgcattctgcacagcgtgtgagcaaggctttccctggacagtgcaaatgcaatctcatctttcactttatctgctcttttgcacacatcttcccggattgccttctgaagtgttaaaaaacgctcctctgtattatggaaatctttgattgtctcatgcagggtcttggcaggataatccgcaagaagcctctgaaaatggccgaacgccagggcactctcataaaagtcttccggcttctccacctggttatagcagaccgcatcttcgataaaaagatacgcccgccagtaatctcctgcggaatctctgtaataacagtttccgtctgctgccggtacaaggttcagtgtctctctctcgggatcccccccattggcaataatcttcccccgcagccaggttgtcactccaacaatattctccatcagctctaccggcctcagaaaaatatctttattcatcctctgcaggataaaccttctgggtttccctgtctccccctcaaaggtaaggcggaacgtatcattgatgtgcccgctgccatagggtatctcctctttcagatgttccggaaagcggaaatgttgtattacctcttgcataatctcctgatccacgtctactcctcccaaagcttctccggataaaggccctttgctttcatatttttaatagcctctaccactacctctttatcttctttatacgtaactccataccatttatcagaggatttcagtacctcaacggttgcttttttctcttccagaagctctcccacaacagatggaaggaagaattcggctttcatgggattctctttcagattcttttccaggaatactggaaaacgttcctttaactcttttaacatactttgagtaaatccccacatattcatggatactgtacttccctccggcagcggcacccaggtggccccgtcatcttctgtataagcagcctgaccgtctctcttttcaattctggtgcgttcccgaatcccaaccaaatatccatgttcgtctgtctcacatacccccctggccacatggccattctcagtaagtgtattttccagaatatatcccaccatggtataacggtacttatcatcatcttcatgggtggagagatagtcaaaaatagcctggaacgcatgccgtccatagtagtcatccgcattgataactgcaaaaggtccatccactgtatctgcacaggaaagcactgcatggccggttccaaaaggcttcacccttccttctgggacctggtatccgccgggaatattcgtcagttcctgatacacataggaaacctccatatacttgcccattctgtccccaatactttccctgaagtccgcctcattttctttttttataataaaaactactttgtcaaatcctgcttttttggcatcatacagggagaagtccatgataatatgcccctgggcgtccaccggatcgatctgctttaatccgccgtaccggcttcccatacctgctgccatgattactaatactggttttttcatatgctccaacctccattgattctgtttcctttattgtatacctgttagctccgggacgtccaagacaggtgcgcttcagcgactctgcggtcttgcgccggcttttgaacatcctctagagtttatcacatttaataggtaccacgcaacaaaagcccgcccaagacgccggctgccttccgctgcataagatagtataatacgcttaacgcaaaaatgctttatacgatatattcacaaaattgtacgattggttctccttttaattgtcttttatagtaagatagactatacttatactatatttaaaactatagggaggtctttatgccattcgaagcacttaatctgagggaagagctgtctgtacacaatatagttaccattcattactttgaatatatgaatacttttgattttcctggagagtcccatgacttctgggagcttgtgtgtgtagataaaggagaagtgattatcacggcagatgaaattccctatattctaaagcgggggcagatatttttccatgcacccaatcagtttcactccctgagagcaaacggccggaccgcacccaatctggtggtgatctcctttcactgcaaagccgcatgcatggaatttttcagggacagggtaatggatattacggagacagaacggacactgctggccagcatcatttccgaagccaggaattgtatctgtccgccctttgacaacccatatacggaaaaaatgcagcgtctggaggatccggtattcggggccgaacagttgatcaaactctatatggaacagatgctgcttctgatgatacgccggggagagcaaagttccctcggggacgcccatccggtaaagtctgttacccagcacaatgaatctatgctctatcagagagtggtcaattacctggatgaacatatccgggagcatatgaccatcgaaaagatctgcaaggcaaacctcatcggaaggtcccagctccagaaacttttccgggagcggaaccactgcggggttatttactatttttcctgccgcaaaatcgaactggccaaggagcttatacgggaaaaccatcacaactttacacagatatccgatgatctggggtatacctctgtacattatttttccagacagtttaaaaaaattgccgggatgaccccttctgaatatgcatcctccataaaaggactggcagagcgcagatgagctgttttattataatattaacaaaaagaccttgcataataacggatttcagagttattacgcaaagtcttttttcattatgcttcttttaccttcttgtaaacagtaatcgccacgtccggacataccgtttaacatatcccgcagctgtattacagccttttatatcacatctctcttatcgatatcccggtaggatacgtaggcaatggccagccctaggatacacaatccggcaggaaccatactgatggaaaacagggacaactgcccctgatcccctccgaaggaagagttcaccagacaattgatcaccacccccgctacaatcgtagccgtcactgacttcctgcgcattccaaaatagaggggaatcatgctaagtcccgcagttgctccggcactgaacactgcacccgaaagccttcccattatctgcatcagcgtgatgggctctgtaacaatagtaatccagcgatttgcaagaaacatccctatgccaaaaataatttcagatagcagtatagttataaaggtaaatccgaaaacaatacagagcttgcatcccattattctctttctggatatagggtaagagaaaaggttctgaatcgtaccctccttatattccccaatcacaacatttcccagcattacgccgccgaaaatgccataagaaatccggcagagaatttctccgaaggccagcatctgggaagcattgtcaaacatcctctctccctcgtcaataatggagcctgtcaggatagtaaaagccagtatagacgctgcaataatcacaaacgctctcacaatactgcttacttttattttagcaaattccagtttcattaatttaagcatgttctccccctcctatcacagtgtccataaaataatcctccagggaatcatttttacatgacatgttgagaattccaatgttttcctgcaccaaagccctggtgatcagcgtctggtcctctatcccataaactctgaggccggacggagagatcactctgaagttcagctcagggaatctgtgatccagtacagtagctgccttctgcacatcatccaactccagctctatatactgtacggcatcttttctgatctccttcatagatacctccctgagcagacgtcctttgtcaagcacccctatctcatccgcaatctgttcaatctctgtaataatatgactggagattaatatggttgcgccgcagttgtcccgcaggctcaccagcagttctctcatctgacggattcccataggatccagaccattaatcggctcatcaagaataagcaggcgggggcgtgtaacgattgccctggcaatccccagccgctgcttcatacccagagaaaactccgataccactttattccggcaagaggacagccccaccatctccagcgtctcctccatttttttctgatcataataccccatatatgcacagtggagcttcatattctcccaggcagacagcctgctgtagaagactggtgtctctatgatactgccaatctgtctgagataagcgacggactgattttgcactggttcctgaaagacatggatattacccatagtaggttttaccaggttcaaaatcatcttcataatagtggttttgccggctccattaggacccagaaaaccgtatatttctccctcctgtacatgcatggatacattgctcactacttctgcatccctatactgttttgtcacaccttctaatacaattatatctgacatagcagctccctcttttttcttatttacttatctgaggactattataacgtacaggaaattctatatataacaaattccttacatttttctgttaggaatcttacaattcccatccccccgctccaggggaaattccactgtaaagatagttttcacaaagggtctgctctccagacggattcggcccatcatggcctctgtgagacgtttggtaatggtaagtcccagaccgcttccgtgatattttttatttctggagtcttccagtgtaaccaggcgctcaaaaacctggttctgattctcttccacaatcccctttcctttgtcggaaacttcaatcaaaacaaagccgtgactctctctcacgcaaagaccgaggtagccgccgtcggccccatacttcatggcattttgaagcagattatttaagattcgctgcagggcctgcttatccccctctatataaagcggagcctccgggatttggatgtcggtccggaaaccgggccggttcagcgaatcataataattaataatctcatttctgcagatttcacagatatccagccggatgtgttccagggcaatgtcccccgcctccagctttgccaggtcaaaaaactcattgatcatgtacagcacatccttcgtttttcggtggattttttctattttttcataggtccccgactccatgttctcccgactgctcagtatcatctctgaatatccgtagataacagtgagcggggtcttgagatcatgggagatattcgccagcatcttcctgctttgctcttcatattgtctctgcatctgttccagatctgacagatgctccaaaaacaggttgacttggatcaaaagttcctggatcgctttttcatcagaaaaaagcaggatttgctcctgctttgcattgctcccgtattctgccagctctctggtgagggtcctaagctgctctgtctggtttctgtatctgctctgggccctaagccacagaactcccaaaaacagagctgccataatcagaagtataactgccatacgtattctccttactcactttccagtttgtacccaatcccccataccgttttaatgtaccggggctgggaaggattgtcttctattttttctctaagacggcgaatggtcacattgattacattctcatcgttcaggaattcatcatcccatatctcctgatagagctgtaccttggtgtatactttacttggatggagggcaaacagcttcagaagttcatactctttagccgtaagcttcagcagccttccgcctttggacgccgtcagattttccgtatcaatcaacagttcccccaggcggataattcctttgtcactgctctccttctcctgatattctttatttcgtctcagacaagctttcacccttgcctggagttccaccacggaaaaaggcttggtgatatagtcatcagccccatattccaggcccagcactttttcatattcttcatttctggcggaaaggatcagtactggcactgtacttactgcccgtatttttttcagtaccgtcagtccgtctaccctgggaagcatcagatccagcacaagcaaatcatacccggcgttctcagaaaaaaggtccagtgcttcctgcccgtctgcagctgaggatgtggtataacccggcagagccagcgcttcctccagcatctcccttatgtctccgtcgtcctctacaattaaaattgatcgattcatagattcccctccgtgtctcctgcattcctccctatcttaacacagatttggaaaataatcaccacggttatctattccagataaatcgtcaccggtccctctgcgccgcctatcacggagatgtcctctgcctggagcagttccagcagttcctgcaccctttttgctgagcttccgtactctttaatgctgctcccatcttccaaaaaaggaagactgctttcatcccagtaccttgtcatcagagtttcctccccggcatcttttaagggatactgccactgtacctcatccagattatctgtcagggccagcaacaaggccgaggctctcatcatagtcctctccagtttacggtcatcagacagcgggtcctcatagaccacccgaaggacatagggtcttccacttgtctccagttccgtagtgtagactgccttgggcatatatccattgccggagagaatgcctaacagcttcccattggcggaagcatctcccagatagggatgtctggcctcaaacagtgcatttgcctgccgtgagatcgcaagaccggccattaattcttcctgatctttctctgaaaaaatgatccggtacagaatggctaggtcattctcacctactgcccagggattctccataaagtctttgcaggagtacccatgaagaatgccctccgacgcattcacagctgtcagcaccagatcctgctccggttcaaatgatactttacgaaaggctttgtctgcctctttcgaagcttccagcacagagagactgattcccctgcaggtattcccgggcaattcactgaccaactcataacctgcatcttccgatgaaaactgcagattcaggtgtgcagcgctgtatcctccctttggactgcgctccacccaaaaaccggttgtgccggttcccccaaaaggaatccccccctcccctactcctttgcagaccttcacttctctctgttgtaaactgccgttatgatacacttctgtatagagggcaaaggatctgatttttttctgcagacggtaagaaaatgaggaagactccccgggcatactttccgatacagacggctgcagattctgaaactgtatataattcttcttccctgttccattggtcccgcagattaccagcagaacagcgcacaggcatacaaggcctgctgtgctccatactcccagtctccggaatctgagaatgttttttattctgcctttcgtttggctctccccaaaggatagtggccgaggcacagagaaccttcgccctgcggcaaagcacagcaaagccatactgtagtctgctttggcattctctcccagatgcctgatcacccattcgtcacagctcatctccatatccctctccatacagtaataggcggcccagaccagtggatgaaaccagtaaactgccagaagaacaaatgcaaataatttaaccagataatcccttcgcctgatatgatactgttcgtggagcagaataacctccatctgctcctcgggaagccgaaagggaacatagattttaggagacatcagccccatgacaaagggcgaggcaatctcatcacactcgtaaatattctcccgcataaggacagctctggatatcttcttctgtactctgaaatatgcgatccccccatagagcaaaagcagcactacccctgctatccatattccggaaccaatctgtcccagagacaggtttccccgcactcgtaacacatccccggcggtgctgcccgttccggtaagattgtccaccccacgcacaacctccgctgtacctcttgccgctgcattctgaggaatcctggtgataagcccgctgtcattcaagctctccccctgttcaaagactgagagattaaaaagactcagccaggaagacaaggataccgggcagatcagccggaaggccgccgcactccaaagacagtaggaataaatcttgggcgcctttcttaggaaacaccggatcacaagcacagccagaatcacgcatccccccatggcacccagatccaggatcctgaaaaataatctttctgccatacgttacacctccctgtgggaatcaatcaacttctttagctcttccgcctcctgttccgatatctttttgtctcccagaaatgcggtgagaaaggatgggagcgagccgttaaacgtacgctctacaaaataatcgctctcctttgcctgcactttttctctgggaatcaggacagagaccacagcatccacattctgtatgtaccccttttcacagagcttcctgattgaagtgtaagtggttgactttttccatcccagagtttcgcggcacagctgcaccagtctcccggatcccaccggcgcatgttcccacacaaccatcataaaacggtaatcgctgtcacagagtttgtaatattccatgcaatttcctcctctatcttttaaatcatataaggtcggttgttatagacctaatttaagtctataacaaccgaccttataaaacaagcattatttttatacttccttttttaatggcagcgtcgcctttcggagccactcccgctctttttcaagcagcagcggcccgatggtctggtacaccctctcatgatattcattcagccactgaatctctttttcccgcatcatctcagggatcacggcagtcgtatcaatgggcaccaaagtcacaggctcaaattccataaactggccgtactcggttttctcagcttttctgcacaaaagcagattctcggtccggatcccatacttcccttctgcatagaatcctggttcatcagaggtgagcatcccctcctccagcacagcgttttctccagggacagaagaaaccttccaccggattgaattaggcccctcatgaacgtttagaagatatccaactccgtgacctgtcccatgattataatcaagtccacactcccaaagaggtcctctggccagataatccagattcgcaccgcagcatccatagcggaatctggcttttgccaggcggatattccctttcagaacaagggtaaaatgttttttttgttccctggtcaaaggtcccacagccactgttctggtaatatcagtggttccctgccagtattggccgccggaatccagcagaaaaaagccctccggccgtatctctgtgtctgactcctctgtgggactgtagtggcacattgctgcattcgctccataggcggctatggtggagaagctcaatcccagacagtctggatcttccctccgcagcttctctatataggcagctgcgtctaattccgtaattctttcttttcccaccctctcagagagccagtacaggaaacggcatagggctactgcatctttgatatgagcagtcttaagatttctgatctcagtctcattctttactgcctttttcaacgcggttggatttctgtcatctataatcctgcagaaacgcccggttaccgcctgataaatggcatagttcacagtctcctcatccagaagaatagcctctttggctgcaagcctgtccgcatattgatagacagagaaatagctctgacaggtgattccgtcttcctccaactcccggcggaggctttcctccactgcttccctctggacaaacagtacaaacttatcctttgtaactgccgcataggataaaaagactgggttgtacacaatatcgttccccctcagattcagcagccaggcaatatcatccaggctggccaggatatggacagcggcgcctctctgttccatctccattctgagctcttctatttttcccttcctggatttgccggcatagcattcctccagacgatatataggctcacaggacagcctcgggcgatccgcccatacagtgtctcccagatcctcctcccaggcgattattccatgcttgctttttatgcactgttccattttcttgcctaaagcagcacttactgtccgtccgtcaaagccaaggcatccgtctttaggaatattcttttcaatatattcctctgtggtaggtacgccctcctcccccatcttcatgagaaggatcccgctcccctccagctccttggctgcctgaacaaagtatcttccgtctgtccagagagctgcctcttttctggttaccaccagggttcccgctgacccggtaaagcctgacagaaatgcgcggagtttaaagtattccccaacatactcagactgatggtaatctgcggtgggcacaaggtaacagtctatgccccgtttcagcataagactcctaagtgcctgaatcctttcttttatcatagcttctgctctctccttcctgtcatctccccctaagaaatccctttcattgtcagcgcaattctttttttctgcagatccacacttaagacctttacttccactacatcccccacactgactacctccaggggatgcttgacaaattttctgtctgtcagctgagaaatgtggaccagtccgtcctgatgcacaccaatatccacaaatgcgccgaagtcaattacattgcgcactgttccctttaatatcatgccctcttttaagtctttcaaatccataacgtctgttcttaagataggtttcggcatctcgtctctgggatcccggcctggtttttccagttccttcacaatatcccggagcgtaatctcgcccacacccagttcctgggacagctttttatagtcccggatgcctttggacaggccggccagttttctgcccgccacatccttggtggtatatccctgccgttccagcagctttttcgcggcctcatagctctccggatgcacgctggtggcatccagaggttcttttccctctagaattctcataaatcctgcgcactgttcaaatgctttgggtcccagtttgcctaccttcagaagttctctgcggctctggaagcgtccgttttcctcccggtagcttacaatattcttcgcaatggttttcgtaatgccggagatgtattccagcagggacgcggaggctgtatttagatccacacccaccttatttacacagtcttccaccacacccgttaaggcttcccctaacttcttctggttcatatcatgctgatactggcctacaccgatggatttgggatcgatcttaaccagctcggccaggggatcctgcaaccgtctggcaatagatgcggcacttctttgtcccacatcaaaattgggaaattcctcagtggccaatttgctggccgaatacacagaggcaccggcctcattggtgataatatactgtaccttttccggtatttcctttaagagctcaacaataatctgctcggactccctggaagctgtgccgttgcccacagaaatcagagtaatatggtagcttttaatcatttttttcaaggtttctttagctgctgcgatcttcgcctccgaggtaggcgccgtggggtagataaccgcagtatccagtactttcccggtggcatctacaaccgcaagcttacatccggtacgaaaggcgggatcccaccccagtactacctgcccggcaataggaggctgcatgagaagctgttccaggttcttcccaaacaccttaatggccccgtcctctgccttttccgtcatatcgttgcgtatctcccgctcaatggccggggcaatcagccgtttatagctgtcttccacggcctcctcaagaaccggagccgtatgcggattatctctggttatcacctgttttttcagatagcgaagaatatcctcctcaggggctgcaatcttcactgtgagaattttttccttttccccccggttcagcgccagagttctgtggccagctaccttcgctacaggttcttcaaaattataatacatttcatatacagactgctctttttcatccttggcagcagagagaatccttccgtttttgaaggtcatatcccggatacgcattcggtaatcggcctcatcggagatatactctgcaataatgtccctggcccctgcaatagcctcttccacggtccggacttctttttcttcagacacaaaggcttcggcctctttctctacaggctggcctgtcatctgcagacgaataatattcgccagcggctccagccctttttctttggcaatggtagctcttgttcttctcttaggccggtagggacgatatagatcttctaccacaaccagggtctgggccgccagaatctgtgccttcagctcatcggtcagcttcccctgctcttcaatgctggacagtacctgctgctttttttcctccagatttctgaggtagtttaagcgttcaaacaggtccctcagtacttcgtcgttcagggaaccggtagcctccttccggtatctggaaataaatgggatgctattcccttcatctattaatttcacagcagcctcgacctgccatctttttacctgcaattcttccgttaatgcctgaataatatccatacaattctgatcctttccttttactctaactttcacaatagcaatgagaggctcatttgtcaagttccatccaaatccctctgttttacctgtatattatttttctccgtatacgctcctgactttttatgatataataaaacccgtgcatttatacaaacagaactggcggatctaccgccggcttctggactggttcgcgaacttcccagtataaaaaaccaagtatctcaattgctgccatcggcagactaaaaatgtaaaggagattggagaatgaatgctaaaagagtcataattgattgtgatcccggtatcgatgatgccctggccctgatgctggcactggcttcaccggagctggatattctggggattaccgtagtctgcggaaatgtccccgcggcaaaaggtgccgaaaatgccctgaaagtcctggactggatgggacgtacggatataccggtgtatctgggggaagagaagcccctgacccgggattacacagatgccatggatacccatggactggatggtctgggggaatccggtttcccctctgtaacggctgcccgcccgaagaccggagccgtttcttttcttacagaaaccctgaaaacaacagatcaagtatctatcattgcactgggacctctgaccaatatcgccagagttatttcctgtgccccggactgcctgcaggggctggatgaattcgtatcgatgggaggctgctataaaagccatggaaactgttcccctgtggctgaatacaattactggtgcgacccccatgccgcaaaggttgtatacgaagcctttgccgggctgcctcagctgaaaggcaaacggattcatatggtgggtctggatgtcacccggaaaatcgtcctcacccccagccttctctggtatatgcagtccataaatccctccatgggcagccggattgcagcgatcacccgattctatatggattttcactggaaacaggaaggaatcattgggtgcgtcatcaacgatcctctggctgttgcctactttattgaccgccgcctctgcagcggtttgtcatgctatacgaccattgagacagagggaatctgtatggggcagagcgtgtctgatactatggatttttggaaaaagccccacaacagctttatcctgacacagacagacgccttcggttttataaagttcttcttacagcgggtgatacatgcacaagaaagccagatggaatcggtcctcccacagataatggcgccggaccctgcctgtgatttccaggaaaggggcgggtttttatgaaaaaaatgaccgtactgcagctgtgtctgctggctttggctgccggcctcaataccgcaggagcctctgttgccctggttctgcgtctgcctatttatctggatactctgggaactatgctggctgctgccctgttcgggccattctgggccatggtgcctgggcttatcagcggccttttctgcggaataaccagcgatatttacgcactatactatattccggtacagctaatcaccggctttgccgcaggacttgtattcaagcgctttacgccaaagggccggaagatactgcccgcctctttgtttgtctcactgcccggaacagcagtgagtgccactgtcacagctctgctgttcggagggattacctcctcgggatccactctgctggtgcagctccttcatgggatgggcgcaaatctcaccctatcagtcttcctggtacaggcagcaacagattatgcggaccgggctattgtcatggcggcagctctggctgtcctcccgcttcttcccggctctgtgaaatatctattgcagaaaggggatgggcaccgtggaacgctataaccgtatcaccaacaaaaataagagagaaatcgtcctgttgaaatcccggccctgcgcctggggaaaatgccgtttctgtgactttattgaagacaataccctggataaaaacgaaatgctgaccttgaacgccagcgttctctcacgggtaaccggtgggttcggggtactggaggttatcaactccggcagctgttttgagctgcccgtggaaaccctcgccctaatccgaacagttgtccgggagaaagggattcaccggctgttttttgaggcccactggatgtaccggaaccgcctgcaggagctgagagactatatgggtattcctattgtctataagattggggtagagacattcgactacgatttcagggagcactatctgaacaagcatgccgatttccgttctccggaagaggtcagccggtattttgattcaccctgtcttatggtggggataaagggacagaccagggagatgatcacgaatgatattactatactgaagaaatactttcctcggggcacgattaatatttttaccaataacagtacagaggtaaagcgggatccggaactggtggaatggtttatggacaaataccgacaccttctttgtgatccccagatagaggttctctatgaaaaaactgatttcggtgtgggggattagagttacgcttgatacaatgaaagtaacatgatacaataaatgggattagaaacgaaagagaggtccttttcatggattacaatcatatgcccggcggctttcaaaacggcccttcttattccaactccagccagcagatgtccgggcttcaaaatcattcagaaggcctggccacggccgcattggttctgggcatatgttctatcgtatttgcctgctgcggcggttccctgttcttcggagccctgggaattattctggccctgctctcaaggggcggatcccgcatggccagcaatgcaaaagtaggacttggtctgtccatcggcggcttcagtctctgcctaatccttgtttttgtctctgtcaccagcttcttaaccaccaccgacggtcagaagttctttacggttatggagcagctaatgaacggagacctaacctttgactctcagcaggagatggagcaatatctgtacgattacttctacaacaatggcaaagggacggttccggaagcaggcggcggatcctccactcccccagatacctacggcgtacctgacggggatggagcctatgacgactactatgattattatgatgacttctttgacggcggagagtattacgataacggcgaagagtattatcaccagtacaaggaacatgagatatagagtgatttcaaaaagggaaaggacggtgtcctttcccttttgtattacagctgtataccccacacagccagcagaatatttttaaaaatccagttcacagcaaggatacccagtgcagtatacagatatccctctctgaacctcatcccaatcttccacctgttccccgacagtatctctatggtattggataccataaaccaaacatacaatactgccgcataaggcaccagaggatggtaccataacgcctgtaccagccttccgtgagacagagcaattgcagcccttgttcccccgcacccaggacagtaatatcccgtatatctgtgaaaaatgcagggaagactataatccgaatagctgatatgcagccatcttgcggccagaacgattccggtacacgccgccagcaacgcccaccctgtccagtataggcttctgttttctcttttacttatgattcttttcatggcaggtgctgtccatttcttgtaaagtatctcgggctctcagattattataaccatttttacctgtacgtcaagaggaattccccgtctcacacaaaaagtatagacatgtccatactaatataatatagtaaatatcacccggttcgggacttttatacatgatattgcataagtttctatggcaaattccggcctttttcagtataataaatgcagaccatttattacttaagatacaggtctaagaatctggacaatataaggaggataagattagataaaggggaaataaaaatggaataccaattgatttacagcaacaggacaactctggccatacagaccacagaagaaggcactgtccttgtaaaagcgcctaaaaaatactcaagacgaagaatccggcagtttgtccgttttaaagaaggctggattaccaggaaaacggagcagaaaaaggcagaggcctggtatatcaatgcccagccctttaccagaaaagagcgttcttattactacgaagccgcggcagagctctttgaggagaaatccagctattatgcggaaatcatgggagttacatataacagaatcacgatcatggagaagcgttccaaatggggaagctgcagcaaaaaaggggaattgcagtttaactggcggcttcttctggcgccggagcctgtgcaggattatgtggtgattctggaactggcacagctcctgaagggaatgtattccacaagggaagtattggaaagtatgatgcctgaatatgagtatcaggagtattggctgaaggccaatggtatcatcctgtggagcagggcgtagggaatgttcttttgtagattagcagccagcactagattaagtgcatggctgctatttgattggtgggattggttggatttacatggaccatgcagtgttttacctggggaaattcctgctctatggtgtcgtggacagattccgcaattttgtgggagtcgttcagggtcatatctccgttggcagagatctcgatatccacgtatactttggcgccaaacattctggtgcggaggagatcgatgccctctacccccggagtagagatgatggcggactccatgtttcggatggtttcctcgtcgcaggatttgtctaccattttatccatggcatctctgaagatgtcgactgcggcctttcctatacagatacaaattcccacgctgacaatgggatccagaatgggtgcccccagcctggcgccaagtatgccgatgaatgcgcctaccgaggagagcgcatcggatctgtgatgccaggcctctgccataagtgcccctgaattaatctttttggcggcagctctggtgtaccagtacatccattctttcacgataatggaaagcactgctgcgatcagtgccaaaacgccgggcaccaccagagttcctttgtcacggtgtatgattttctgtatccccccgattccgatgcccagccctataagcataagaatcacagcaagcagaatagatgccacacactccagacgttcatgtccgtaagggtgttctttgtctgatttcttatctgctacagtaacgcctatcatcacgataaaggttccgaatacatcggatgcggagtgcacggcgtctgagatcatggcccctgagtgggcggcaattccagccaataatttaaaaagggacaggatcacattaaccccgatactgaccctggatactttcattgctatccctttttcttttgaaccttcgttagtgtttcccttattccttcgttccataatagttacctccattctctttgtgaataagatagctctatggcaccggcggctgagccgccacgcaaaaacctgttgctttgttcaccgcgagggtacaagaaagattgcgcgaaagcgcaatctccgcctgcggcgggctgtcgcatgcagcatcttcctttccgccgcagtgtgttcccccggagttttttttattacatacggaacgaagtttcctatgtaataaaaaaacacctgcggaacaatattagtaaactactgtcccacagatgctgcttacatctgctgtcgcatacacgcgacccggccccacaaatggaatatccatttatcgcctgctcagtttgtactgtagatttatgcagtgcaaagagtattttatatatcttatgaaaaatatccggctttgtcaatacttacgcctttattatttagcacatgccacaaaaagagtttccataatgcctccaaagccgataaagtatttgtccgtacgttctacctggatctcaagtctttccttttcatacccacgctccaaagcctcctcctccgctcgtcttaccgcaagtttttctgccagcgcacaggccttttcgtcctctttgggttcgaagataactgcctctcctttggagctgacccgaaggtgggtcacagcgcccccgttgtcatacacgtaagtcaccatagcctgagccgttacttccatattacagattgctgcccctatagcattggcaactctgaaattctcaggaatcaccgcccgggtctggagtgcttttgccacatcctctgtgaataccttgacaggaccgccaattcctatgagcggatactccagccggaagagagctctgaattccatgccgccgggacattcctgtccttttttctccccttttgcctcctcccactgacaggctatcatctgttccagcaccccgcccagaccatctcttgccgcctcactgtattttctcaccatggccgccctgactatattccggtacattttaaactttaccctgtcgtaaatcttttcacagagatcatccagcgtccagccgtgaatatgagccagataaactgccaggttctgagcagcctgggtatcgtggtctgtaaactcccctctcacatgcataatatccgtaggggtaagccctgacttcataatgattcctctgctttcaagactgccaagacgcagatcactgacactcatctttagcgtcctggcaagctgtctcatagacataggctttgtctccagtgcgcagattatatctctttcatgagtcggaaagctgctgatgctttgcactggttttgtaagcttataatactcatgagcatgattggatatctgccactcactgtttctcagggcactcaattcctcacaaatctggggatattccgatgccagaatgcagatagggattactctgccatccatgatcaccggctcgttatcctgaaacttgacttcgctgtcccctcccagtccgaaggtgtctatgtacacgcccttcacaaacgtcttccagtccccgatagtaattcccccgcgcacaatggacggggcaccgcctcttaggattgcgatatctgaagttgtccctcccatgtcaatcacataggcatccttctctcttgtcagccccccagcccccgttacacttgccacagggccgcacagaagcgtttcaataggatgaagtctggtgtactccaccgacatcagcgtcccgtcgctgcgcacaatggaaacgggacagtcaatccccagtcttcccataacaccctttactgccctcagaaactcgtcaatcaaaggaattaatttaccgttcagatatgcgcccagcccccgctttataaatcccagctcttcgaaaagctcatatccgcagacaacggttttccccagaactgactggatgatatccctggccttccgttccagaaccgaaccggtctgtgcggtataaacttcgctgactgctattacatcacagccgccgcactcctcccgtaccatcccggcaaattcctcccagtccggcatgcaggggatctccccggaaaactttgtcttcgtatcaatgcagagcagatctcccggaggtattgcccccagttgagccgtaattcttaaggcagactccttatctgttccaaagagaatcagttttgcctttccatatttcttctccacacatgcatttgtggccagcgttgtggataaagccaccattttacagtctctgaggtattcctccggtacctgccccagcgcgttttcaattcccgtttccaggttatcctttgtggtcagtgcctttgccgacgccagaacctctctggtctcttcgttcaggacagctgcatccgtataagttcccccggtgtcaatcccaatcactacattcatgctaagaccccttttctttatgattctaacttaactcaaagtataacctatttgaacacctggtacaatctcatgaaatataatatcgcatctttttttgtggttttatactagtctaatagagtcactggaggtataataaaaacagaattgtttggaaaggaagtcactatgaagaaaaagccgcataaccggggatttactctggttgaagtaatcgtcgttctggtcatagtaggtatcctgctggcctttctcatccctgcacttaccggctatatcaaaaaagcggcaataactgcctgtaatgccaataaagcccagcttctgagagatctgaccgcagaagaaatttataccaaacaggcagacggctactatgacaccagagaacttcaggaattagcagacaagtctgagtacaagtgcaagcaaggcggcgcctatgaggtaagcagaggttctgacggaaccattgttatattctgccgggagcacgataaaaactataattttaatatgaatgaggcgctttctcatgtaatatccaataactccgaaatcgccggtctgataaaaaactatgcagatcagaaaaaacatatagattccacgtccgggactgggaaaagctacgaacagatcctaagcgctttgggacaggcgggattcagcgcctctcaggcaggagtccagacctggtctctccagggtatgggcaatggaaattattatttttactggacaacagaggatattacttccaagaatccgggagacaaagtcaaagtgctgcggtataattcttcccggggaacttatacggccggatatgtcaccatagaagagaacactttaagcgcttctgactcctccgacgggcagagccatacttataatgtgctcggcaggggggataccaagtgggaagaatataaagataccccgcagtcaggcaaggataaaaaggactacaatacgatctttgatgtgttcaagaagatgtaaaaagaatatacataagcccctcttctcacggggacgcccaggagcgtcttcccgcagaagggggccttcttctatgcctctgtactgtctgtcaaattggcaatctccctcatccgttcaataataggaagatgctgggtacactgctcttcacatttcccgcaggccacacactctgccgccagttttttgtctacatcccaatggaaccggaatcttcggttaatctcctctaccttcccggtgaggatcttctgattataggcatccatgtattttggaatctcaatgtctttcggacatcctttgcagtagccacatccggtgcaaaggttattcagggcaattcctttttcctcaaacctgcgggctacctctttcgccggcctttcctccaggttctccaccgcttttaccgcatcgtctatatgagcttttgtggtacatcctgccagtgcaactgtgatttccctgtgagatgccacaaaacgcaaagctgcctggggtaccgtcagctccgttccctctgtcagataggaaaatgccttggggttctgagggatgagtcctccgcccagagggttcattaccaccactcccatgccgttttcatatgccttttcaatcccactctggcggaaccggtaattcagcgcgttgtagccgatgagcattcctctgaatttcccgctctctactacagtctcaatatcatttccctgcatatgggaggaaaatacaatattgcggatcagtccctctgcctttgcctcctcaaaaaagcggtaaagaacctccatgtgcttctcccaggattccagattcagcatgcaccacatatggtagaaatcaatatagtctgtcttcagacgctgaagggacatttcaagccttctgcggaacagcatcctgtccggcttctctgtgcccagggtgctgaagtttgtctttgaagtcacatacacctggcttctttttatctgagacaaggccatacccgttacaatctcacttttgtcctcgcagtaattgggcgcggtatcccagtagttaatccccttttcaaaagcataaagaggaatctccgcacatttttccagccggccggccctaatgtcctctgcgtcgtaccgcatggtacccagacctacagctgagacttttatacctgtattgccgtatgatttataatacaaaacgttgtcctcccattgtgtttttcttaattttatcatggctggagaggatttacaaagattatatggctccgtattcccttttcagtatttcaaaatagtccgttttctcttcctctgttaattcccgtatgaccctgcagggaacccctgcggccacaacattcgccggcacatctctggtaattacgctcccagcccctataatggcgttatcccctatggttactccctgatcaatatgtacacctcctcctatccaaacgttgctgcctattgtaacaggcttcgcgaaacaggctcccgcggcccgttcttccgggtcaaaggcgtgccgtgtagtataaatcccaaccctgggaccaaacagtacattatctccaatttcgattccaccgccgtccagcataacacagtcaaagtttgcataaaaattatttccaatcttgatatggaatccgaattcacagcgtaatgaaggttcaaaaaatacattttcccccatctcccccagcagtctttttaaaacagcctcccttgcctcttggggctggccataggtacggttgtattcatcggtcaggaataccgtttcttttcttgcctcgatcagctcctctgtctggtcattatacatctttccagatatcattcgcgctttctgttcctctaatgtcatacctaactatcctttctgttttgctattttatgcccatgggctaccgtaagtatactcagaagatacactataatgcaagtgcagcggctctgcagtatggatattttgtattgtatccctaaaccggttataatgacagcacaaagtccctacataaagttacgataaatatggtactatatctttatgttatctttcggacagaagaaagcacgataaatcgggaacaattgtttttccagtgataagatggatacacagacaagggaggaaatgctatggaatggatagaaagtatcagtaaagcgatcagttacatcgaagataatcttaccgatgacctgaccatcgaaaaaattgcggataaggtactcatttcgccattttattttcaaaaggggttttctatgctctgtggatttactgtcagcgattatatcaggcagaggaggcttacacgcgccggcagcgaacttgtttccacagaggaaaaaattattaccattgctctgaaatatggatatgattcccccgacagctttacgaaagctttcacacgttttcacggcgttacacctacggctgtacgaaaagacggagctatgatcaaatccttcgctcctctgaaaatatcattcacattgaaaggcggttatactatggattacaagattgttgaaaaggaagcatttacagtgatcggcgcatggaaaaagtttccctatgaaaatgcagcggaagcgattccgaacttctggacggaacactatcagagcggcgggggcagtaccgtatgcggaacatacggcgttaacattgatgagagtatgggcggcaaggaatttgaatacctgatagcggacgattacaaggaagggacagaggtaccggacggctttatcacgaaaacgattcctgcatttacgtgggcggtcttcccctgcagagggagtatgccaaatgctatgcaggaggtatgcagaaaaattttctctgaatggctgcccaactgcaaagactacgagtttgccgccgggtataatattgagatgtatcacgatccttccaaatatcctaatggtgtccaggacgagagttactatagtgagatttggattcctgtaaagaagaaagcttaagcgtgcggcttaatgaatcactgttctcaatgcggggagaaaaatgttctggaaaagagaggggtgtgactaagatatgtcacacccctccctttttcagactatttatttacatcccctatctgttccctttttcccttttataatggcgatggcacctgcatatgcagcaagtaatgtgacggccagccttccgataggagccgcgtccctggtttgaaccgcatctattttgtgagaagacgtttcagcagtattagacccctttttctcatcctgagcatccggcaatttttccggctctttttcaatcattttaattgtatattcgcggacattccctgcaaggctatttgcgtctgcgacccctaatccaattaaaaactcatcatatactttgtccggcttacccacgagatagtcaccatctatcttcatccagtcaggagctccatgaaactcataagtaaaaggtggtgttccccctgttacttccagcggtagtttaaatgcctctcccactaccagagttaccaccccgtcatctgacggtagctttacctcaggtatggttccaacttcctcgcctaccacaaacgtaacatctaattctgtggaagtttccccgtttgcatctctaactttatatgaaaatgagtactcgccaggttcgttaggtgtccctaaaatctctgtgcctctgacaaatgcccattcaggtccgttatactcatagatctgatacgggggctctccctttgacacatcaagggttatcagaaatgcacggttcacctccagatgcaattgactttcatctaccgctacatctaaaaaatcctcctctataaccggttcagaggtatctccctcagcctcattctcattatacatatctgtcaaaacttcctttgtttcccccggctgttccactgggagtgcctcctccccaagggtatttcttttaccctcaccgctgtcaagattctgctcctctacgccagtcattgtgtccacaatagcagaagcttctaactgtacagtatcctgtaccccggcgtatactaactcacctgccgctccagacccaatacatgatacaattaacaataacccacagcccaatacgtatagtctatttcttttcatactctcactccttttttccgtataatatcaaacgccagaaggaacctcctttaatattgacattttaacattgtgcagagtatttgtgtagaaaataaactagatttattagttttttaaattaatcagcatactattttatatttaagacacaatttgtcattttatccctttatttgtctttgcttcttaacttctgcatacatacttaattcacaactcgaacttatgctttctttcaacgccctcctcttctaaaggtaaactacacgctaacagaatttacccccgggtatgcaataagaaaaacatggctgcatacattaaaagaaaaaggatttatatggatattcatattgttgccccaggggatactatcgcctccatcgcagcccggtacggcgtttctccctcccgcctctcctatgacaatcaactgaatgaacagagtcatctggtggtagggcaggcactgcttgttttgaaaccggaactgatccatgaggttgtccccggggatacccccagttccatatccagtcagtatggtatctctgcccttgagcttctgcgcaataaccccttcttgtcgaaccagccttacctggtctccggagaatatctcataattcgttatgatggtgaaaaaacaggaagtatggagacagatggctacgcatacccttttataaatcgtccccttcttcggcagacacttccctatctgacagctctgtccattttttcttatggatttacaccggagggtgaattgattcctgtggacgacgcgcctctgatttccatggctcaggaatttgatacccggtgtgtcttagtgctcaccccgttttcagccagcgggacctttgataataatctggttacattagttaccaataacctggaggtgcagaacagagtcatagaaaatctgcttctgacggttgcccaaaaaccttaccaggaggttgatgtggattttgagtttatacgggcagaagacaggatcccctatgtagaattcgtgaggaatcttacccggaggatgaacgccgtcggagtcatggtctccgtagcactggtcccaaaagtatctgccgatcagccgggacttctgtacgagggaattgactaccggctgctgggggaggctgctaatactgtgcttctcatgacgtatgaatggggctatacctacggtccgcccatggcagtagcccccattccccaggtcagacaggtgcttgactacgccgtgagcgaaatcactcccgccaaaatatccatgggaatccccaactatggctatgactggcctctccccttcgtgcgcggggtcacggaagctgccaacataggcaatcacgaggccattgagatagccgccttgaacaatgcagcaattcagtacgatgacatatcccaggcgccgttttttgagtacaccagagatggcgtcgggcatatcgtttggttcgaggatgtgagaagcatcctggctaagttaaacctggtaacagaatatggctttcggggtgtggactactggcaattaatgcggcccttccgccagaactggctgctggtaaactacttgttcaatatcttacgctgattctgtcgctgaataatggaaaaagatgcaaagtgcaagaaaggaagcgcattcctgccgcgcttcctttcattaaatcattctgctatctgacgctcaatctccatccccccgctccctgattgacatctaaaatctgctccgccagtctttcaaccattacctctgataatatcttatcattattcatacgcgcacctcccggaactgtcttcatgtactgttgtgtagtattacttcttaatactataatactacttttatcaataatgtcaatccttcttgtgtattattctttgctattacatacagcgaaggcgtgtgtcagcccaaagaaaatgaactagggtatgcctcttggtataacacattatagcacagaaagctcccatcctctgtaaaggatgaaagctttcctaataataacttactgattatatcattctcataattactaaataaaccgcagccattgagataacgatctgtattatagtaaaccggaataccgtctgcgtattggaccatccccaaaccttcctcacgtgatcgtgaaggggcgtccgcacatttttcaaaatacgtatctttaaaaacctaagcagcgacacctttagcagccccagaccgccgtcaagaatcaataccagtgcaaccaacaggtataaaaacggactccctgtcttgagtactgcaatactgataaacagtcccatggctctggaacctgcatctcccatcatcagtttgctgggcgtggcattaaaccacaaataccccaggatacagaccgcgaacagcaatatcagataactgaaatcatcattcttcccttttataatatcaataatatagatgctgataatggtaaccagcgtcagggttcctgaaagaccgtccaccccgtcggagcaattagtaacatttatggatgcccataccaagatgactgtcagaattccaaataagacagcaggaattgtaatggttgtcccggtaatcataatctccactttattagaattatagtttaaaaacgttaccgccaccatagccgcaatcacaaaatccagaaatccctttttatattctccccagggcaccttagatgcatcatctaaaaagcccatcatcatagctgccactactaaaataatgtaaatgacaagctccccgctcagccttgcaaagatcagcccggatgcggcaaataccaatataaatatgaatccggcccctctcggcttccccgcggacaacttaccgtcatgggcaaaatcccttcctatatccttcggcagcaagggatgaaacttcgccgtgcaaaagcaggtagcaaaaaatgcaaagagtatgcccagaaacatcactgtcggtaccgaaccgttaataataaaatttaccatttgttttttccctttttctttattctctttttgtcagcacccttaattatagcctcccaaagaggaaaaaacaatgcctttttgcttatctccagagataaacatactatccgtttctccgtttttccagttcctcgatcttccactggcatttccaaataattctcagcagaacaataagcaacagtccaaaacaaaccgttgttcccccgaaaatataggaaccggtctgaactgcagcattgagttgaagaaacacaactatcacttccactatcataatgtacgtaaagaaatttcttattcttttatactgtaccactctcgaggaatcatcggtatacagttcaaatcccccgtcttgggcatcttttctcagataaacccactggctccactgttctaccacctcaataccgctgtcctccataaattccttaaagtcccgggcaccggcagaagtactgggcatcagatcaatctggtaaatgtactgtcccggttcacagggaacaaaggtatatacacccaggaagtaatgctccagtgcccagccttggttaaccatctcattcagccatatctcttctgcatccttatcgtagtaccacttaaactttttcattccccttcccccattcttttcgcattgtccagcatttcctgcagtctgtctacttctcttccaaatatttcttttcctgtctctgttatcacatactctttctttttcctggacgtcttatcctcactgtacagcctcacccatccctttgtcagcatagagttaatggccccatataaggttccggggcctaaactcaccctcccgcaggtaatatcggccacttcctgtataatgccgtatccatgtttgggacaccttacagctaacagaatataataccaggcttctgtcagtacaataccgttttccacacctatcgtcctccaatctatcgtatatcaaatatatcgtcaatcgatatattataatatatcagctgacgatatatttgtcaataaaattatagttttgtgtatgtaaagttcgagataaaatagtcggccagcgcagcgtcgcagacggacggtcaagggaggaggtcttggggccagggggactgggtggatctgcttgctactgcgtttctcctctgctaactgcctggccgttcactaagaagctcaggaaagccttcgctcctaagtgaccgccggcagtggatcttcggacgcactccgtagtctgcacagatccacccagtccccctggccccaagacctcctcccttgacctggcagagactcacttcacattcacggaaaacgggtggggaaggtcgaacgttgtacacttttcctcttgtttcccactattaatgactcgatgttttggataaatagctccccctggaacttccccatacccaggtgagaggaatcctgcggcggtgggctggctggttcgggcgggcgggagggcttaagttccggggacgattccgcaggagtgactagagagtcttaggcaaaaccgggattcccgcaggagattttttcggcagtccgggccgaaaaaaagtgagcatgggcagagaatgcacatcaagcattctttgcacatacgaacggtgctccggcggggattccggttttgtcttagactctcttcgcgacggaggtgtccccggaacttaagcctccctcccgcccgaaccagccagcccgctgccgcgggattcctctcaccgtccccccgccacctcacactttccgacttgaatcactttaagctgaagtccaagcgctgcacccctaaatcccaattttacccctattcatccaacgtcttccgccccaatctcacatcctccatcaattccgccatatcctcggtaagatggttaaacagataattcttattccccttatgtgtccccatataagtatttctgatttcaatattggccgcctgtatctcttccctgagccctgcagcggacagccgggctgccccctgtccgaggataattacctgttctagggcatccgaagtggctacagtgacctggtgttttctaccaatttcatgcgccactttttcaatatattgatccgccgtctctgcctctttggtatataccacatgaatattatggtattttaatacctcaccctgattcccctctactttgtaagcgtcaaaaaccagaatcagtgtattctttttatatccttgataattgcacagaatatccataagtttgtttctggctccctcaatatttacttctgccagctctttcagctcgtcccatgcaaagataatattatacccgtcgacaagaaggtactccttttggctgtccggcttcctcggtcttctttccttttctcctgccccggaagggacatgatttcgattccaggcatttttttcccgttttatgggtccgaacgtacggacaaaaatctcctccagttccttttcattctgccagctttcacgaaaaccggatccggaagaaacggataactccggaggatactcctcttttttttcctcctttaatctccatccaccatccacatgcatatattcgggtacctggtcccagggtaccacaaacccggctccatgagaacagaagactgaccccgtaggattctcaagatctgcctccggctcatatccaatggaagcaattacctcctctgcattatggcatggttcgtagcctttcagactgcagaataatcttccgcttcctctggtataggcgatcacttctctctggtatccacccatggcggacacaggtgcactgcccagaatcactgcagagccctcctcaagctccggaggggaaaaactgccgtacatcttttgaatatcagacagagcccgtcccaccttgtcggcgggcacctccagccggaactcatagacaggttccagaaggatgctcctgccgctcattagaccctgccttaccgcacggtacgtagcctcccgaaaatcaccgccctctgtgtgcttctggtgcgctttcccagccaccagagtaattttcatatcggttatctctgagccggtgagcactcccttatgcactttttccctcagatgggtcaggactaatctctgccagtttctgtccagcatatcctcactgcagaccgtgtcaaatacaagccctgcacccggctctaagggctctaacagaagatgaacctctgcgtaatgacggagaggctcaaagtgtccgatcccttccacccgggtttccagtgtttctttatacacaatactgccctcgccgaaggacacttctatgccaaaacgttcctgtatcatgctctttaaaatctctatctgtatctcgcccatcacttgggcccgtatctcatccgtactcttttcccacacgatatgaagctccggttcctcttcctccagctgccgcagcttcagaaacataccatgtacatcacatccctcaggaagaagaatctgatatgtcagcacaggctccagaagaggtgcttctgaggcggactctatccccagtccctgaccggaatacgtccgtccaagtcctgtcactgcacagacagaacccgctttcactttacttactgtctcataacccgccccagagtagattctgatctgatccaccttttcctcccatcttacacctgacccatcttctccaccggcaagcagatccttaaccttcaggcagccccctgtcagcttcatatgagtcaaacgattcccctggggatctctggatattttataaacctttgctccaaactcttcgggataaaaagggcagaccatatactcctctaatccactcagaagtttgtctactccctttattttcagggcagatccgaaataacaggggaaaacttttctctcgcttataagcttggcagtctccctggaagttattctaccggtttccaggtatctctccagagcagtctcgtcacacatcgccaggttctccataaattcttcctggtcctgagtctctccaaaatccaggcatctttcgtcaagcttttctttcaattcccccagaattttatccctctctaccccattttgatccattttgttcacaaatagaaagaccggtattctgtagtgtttcagcagcctccacagtgtctgcacgtgtccctggactccgtcggcgccgctaatcacaaggatggcatagtccagaatctgaagcgtccgctccatctctgccgaaaaatccacatgccccggagtatccagaagcgccacttctatatccccaagcagaaattttgcctgtttcgagaatatggtaatgcccctggaacgctccagttcgtaagtatcaagaaaggcattctggtgatccactctccccatctgccgaatacttccgctcaggtacaaaatactctctgccagtgtggttttccctgcatccacatgggccagcagaccggcacatatatgctttttatgattttctggtttattttctgatgcatcgttcatcgaaaatacccctttcttatgctataatgccatagattatagcataagaaaggtcataagtcgacaacctataaaaacgcgtgccatcagacacgcgtttttaactctattcatcgtaagtattttttcagcaggcgggttaagtctttgatatcaacaggctttgcaatatgagcattcatgccgcattccatgcaccgttggatgtcctctgaaaaagcgtccgcagtcatggcaatgatcggaaccgttgacgaatccggacgctccagtcctctgattgcctttgcagcctcataccctgtcatattgggcatccgtatatccatgagaatggcatcgtaatatcccttgggtgaatcccggaacttcttcagacatatctgtccatcctccgcccattctagtttcgcgcccaggtcggacagcagttcccttgtaatctcccaattcagttcattatcctcagcaagcaggatacgccgatcagacaaatttatatttttctccaataccaggtcttttgctgcatcaccccccatatacgggcgcaagccataaaacaaggttgatttaaacaacggcttggaaataaaaccgctgattcctgcctctctggcctctgtttcaaattcactccagtcgtatgcagaaataagcagaatagggatctcactccctaaattacgccgaatctctcttgccacctgaaggccgttcatatcaggcagtttccagtctaatagaataatctgataatcgtctctccttttatggcgatagtttgccaattccaccgccttttctccgctcagtgtccattctgccttaattccaatggagcgcagtgcgcctgcggcggttttgcataacaattcgtcatcgtcaactaccagcatattccatggcggaagtaccatatccacctctattgcagcagccttttcaaaatctgccgtgatatggaattccgtaccttttccaggtgcgctctgtacatcgatagttccttccatcgcatccacaatatattttgtgattgccattcccaaaccggccccctcggttttatgcaccctgttgccgtccgcgcggctataagattcatatatttttttcagaaattccggtgacatgccgattccattatccttaacattaatatgaattcgcacaaagttatctccctttggagatttttcctctgacagagatagctgtatagagcctccctcaggtgtatacttagtggcattagacaaaaggttaagcaaaatctgattcagacgtaccccatcgcaccacacattttcggtcaatatattctcaatatgtacatcaaaatattgcgcttttgctttcacctgtggctgcataatactaacaatcccttcggtaacctctctcaaagagatctgctctgttgttaaagtcaatttgccgctttcaattttcgacatatccaatacatcgttaattagccctaagagatgtttactagacagtgtgattttcctcaggcaattcttcacctgttcccggtcatttatgtgtgccgtggcgattgcagtcatccctactattgcattcataggtgttcggatatcatgactcatattagctagaaattcactctttgctttacttgcctcaatggccgcctgacgcgcctgcctcagctcctgcagctgcatacgagtcatggaaaagtaccggataaaaattaaggttaaaaggatcagcacagaaatgcaggacagcagtgtaatgactatgcgctgaacactcagactgtttatagtctcgtccaataccccataaggcattaccccaactaaataccattcagaataaggcaatggcataccataaatttgccggtcctcaccatttactttaaaaattgcactgtacttttgatcgcttttcagtgcattagcaaacctttcaagctccctctctgagagtaattcatttgtctcagaattatgctgcttctgcagcagacgaaagcattcccacaattcagtattagaattacgtattacaaagctgccatccggccgtataatatgataatacgtgagctgcccttcgtcctctaaggaaagaaaatcggtgatataatccagaggaacagccgctatcagaccgatgcattcctcgccgttttgcatcggataatcagcctcaactccaaacaataccacttcatttccaactgcatcaaccccgacagcaactctttgttctccctgctgtaatgcctctacaaagggggcgggattaattggctgtatggactctccatagagtgtttcaaagtttccctccttagaacaaatagctaaatagtcaaatcctctcacctgcgctctgtaaacaagttcttcatattggctctctctgtcgttgttctctgctgaaaccacagatgtaatgccctctacctgagcaaagcgcagtttaataacattttcaaaatgtctggacatttgctcattcattcctgccatatagatttctccaacttcgtaaatggtctttttgcttttccgattcatatagactcccagcaggccaaaagccactacactaaagatcagaagtccaatgaagctgcaaagcagaaagtgcgttgttggattcttatgttgtcttctgctcattgatgctattcctccccgtaggtctgttggcggtacagagagctgaccttttacgggtgagcagtctgtcatagtctattttgtttctcatgcgtcgaatatatttatcctcttgttctagggagatatctcttagctcggctttaaccgcatccgctgtttccaggagacattggagcaaaattggattaaaggttccgcattgtccttccaaaatcattgtcaatgcttcgccatatgtataagctttcttatagcaccgctcgctgattaaggcatcgtatacatctgccagggaaaccacctgggctgaaatgggtatttcatcccccactaatttatccggataaccggttccatcatatctttcgtgatgccaccggcagatttcagaagccactttgacaagaggcagctcttgctgttcaatgggtaattccgacagcatttccgcaccgattgccgcgtgggtctttatcacttcaaattcatccccggtaaggcgcccaggcttattcaaaatagtgtctgaaattgaaatcttaccaatatcatgcagggatgaagcggtgctaatcaacgtaatatccgctttcgacaagggatatctgtctgtccgctgaaccagatgcttcagcagaagctctgtgatggtgttaacatgtactacatgcaaaccgctttccccattgcggaactccacaatatgagacagaattgaaatcattagcttattatttctctcctgctcactaaattgttctgtaataatattttcgagatgacgctgtctggcatacagaagcatcgtgttggaaatacggcgatgaacaattgcggaatcaaacggacggctgatatagtcaaaggcccccaagtcgtaagcacgtcttatatttgcaggggaatcatccgcagaaatcataataacagcaagtgtgtcgttccagtgatatctgtttatataggacagaacctcaaacccatccatctccggcatcataatatccaaaagaagaagcgaaaaatccattctgtgctgggatagaagcgctactgccgctgcaccgttatctgcctccacaacctcatattgatctttaaggatatcagccaaaagagctctatttatttctgaatcgtctacgattaagattttttgcttatccattattctttaatctctctcctgtgataatacggttttattataaattcattctgtgtggtctcgcaataaccatattggataggtatacatatagctgtgggttttttactgacaatttatcctatacagagtataataaaataagaatggacaggagacaaattatggaaccccaagaaaccaagttctcatttatctatcatgaaattaagcagctcattataaatggccagattcctcccggtaatcgtctgccatcctcaaggatgctgtgtaatcagtaccatgcaagccgctatacgattaaccgtgttctcgaggtattgaaagatgaaggatttattgatataaagccgcgccttgccccaatcgttctctcaggaaagagtgcttcgagggccggggacatggagtttgacatattgagaaaaagggagagtattgtacagctatataaaacctttgggttactattaccgccccttctggtttttgcctcccagaatttaaacttggagataatgcctcattataaacaggcattaaaagcatcacgccttggtctttccagaggcgggtggaggccttcttctaagtttataaaagagatattggaaattgggggaaaccccttgcttgctaacctattttccacctttgagcttcataataatctaagtttttttacagaggaatgtccttactttttagaaacctttctggggccctccctatccaatgcagatgttcttgtagatattttgaaaggaaacgaccctgctgttaagcatagacagttagcacatttatttcaaacactttccgattccattgcagccactttggagcacttagcaggtataacctctccatgtcctgcgccctcatctgcttcctttttatggagaccaacgcgcggaaaagactacttctacacaagaatcgtcagcgatttgaaccagaaaatcggcaatggcgaatatccctgcggaacatatcttccttatgagaaacaattagcgcaccagtacggggtctctgtatccacaatcagaaaagcattaggagaactagcgcagagaggttttgtaaagacattaaacgctaagggcactattgtgatcgaaccggacgattccagggtgaatcaggtgctttctaatccaagacgaacagaagaggcactccaatacctttatgcactgcaattgctggcattaatgatcgactcagcagctttgatggcggcccccaagtttacttcaaaagaattggacgaattatgtgatacattcgcccgccaggataccatttgtatcattgatattttcgaggcaattttaaaacatattgaatggaagcctctccaaactatattgacagaagcattccgccttacggaatggggtcactatatcgcatattatgacacgaaaaagcaagtgcttcaaaatctcaacgaacaaattattgaagcagttcagcacctgcgggaaggcaatgcaaaggcctttgcgtctggcattagagattgctatcgttatacattagaacatgccaagaagtatatgattaaaaaatacaattttctccgggtatcttcgattcggattccggaaatatattaggtgttatccacactacactcgccactcagaccggttgctttgaatatacggacataaatcaatgtccgctggatggtttccaacacgatccggtaaagcacctgtacccggataaagtggattttacaggagccggtgttgctcttgtagttggagcagacaaaatggttctggatgtcgtccttgtaggtcttgcaggtacagaggtacagcttggccccgcagtcggcgcagtaaagaagcccggaaaagatactaattctatgtcagcttccaattctggctctttgtctgtaacttcaccatacgagcgtagaggccgttttgttccagcaatgttttcggcgcgccttcttcagccactgtcccttccgaaagcaccacgatcttgtcagctccggccacggtgcgcatccggtgggcgatcaccagtacggtcttatctgcaatcaggcgggagagggccgtttgaatcaaggtttcattctccacatcaagggaagcggttgcttcatccaaaagaataatcggcgcgtttttcaggaaagctcgagcgatggaaattcgttgccgctccccgccggaaagctcgcagccgttttccccaatgttggtatgccagccttccggcagcttttcggcaaattcatccacattggcaagttttgcagcggctaaaacctgttcatcagtagcgtccttattcccaattcgtatattttccagaatggtattgtcaaacagggtaacatcctgaaacacaatagagaacagggaaagcagcgcctccgggtcaattttggaaatatccatgcctcccacggaaatccttccttggctcacatcccaaaaccttgccgccagccgcgacaccgtagtcttgccgccgccggaaggcccaaccaaagccgtgacttcgccctgttttgcagtaaaggaaacatcccttagtacggtttctcccgtgttgtaggcaaatcctacatggtcaaatgtaatatcatagcctttgttgaaaagcctgttctctccctgctgaatcggatgagcgaggatttcattcatgcgggcgatgttagtgcgggtgctgatgaccgccgccagattttgcagcgccccttgcagcggatcataaagccgtgagacaaccagcagaaacaggaagaaggtcaacacattgaggctgcctcctataagcaggacagatcctatcagtgcaacagtggcaattcccagctttaataccaatgacgcggacaccacaaaggcagccagcccgaactcatttagaatggagcggtgttccacggcgcgaattttcttttccaagcctttcaggtattcctgttcggcattgttggccttcaggtcacgcactgtttcaatgcactcctgaatcccgtccgcacaggccatctttacatccatggctttctgattgagacgttcctgcacatttgcggagaagcctacaatggcaaaggccacaggcaatacccacagcgccgctaatgccatgcgccagtcgaacaccaaaagactgatggaaattaaaacagtggagatgatggagcctgccagttcgggaatgaagtgggaaaagctctgctccaaaaaggtgcagtcggccatgatggtgctggtgaggtctgccaaatccttttttccgaagaaggacagcgggatcttccgcagccgttcagccagcgtaattcgccgcacaccgctttccctataggtggcaaagtaagtggcgttatactgaatgtaagtagtgagcaagatcaagccaatgcacaccacacagcccacgatgtaaaagataagtttttcactcggaacaccgtcattcatcaaatcgcccactaaaaaatacagcaggcccaccgggaacataaaggaaaggttttgcagcacacaggccagacagcctttcaccaaatccttggccccctgctgggagagggcatatcgtttttgcagccattttatcatgtttattgtacctcctttgcaaccttccactgaacggaagtttcatagtcctgccacatgcggctaaaaataccacctttttccagtaattcccggctcttgccgctctctgtgatctgtccgtcctcgacgacatagattttgtctacgccagccacggtagagagccggtgggcaatcataatcaccgttttcccctcggacaacttagagaaggcggactgcacgcgggattcattatccgggtcggcaaaggcggtcgcctcgtcaagaataacgataggcgcatttttcagcataacgcgggcgatggaaatccgctgctgttcgccccctgaaaggtaaacaccctttgtgccaatcacggtgtccgcaccttggggcagcttttccagaatatcgtcgcactgggcgttgtggagtgcagccatgatttcttgccgggtggcatccggcttacccatgcgcacattttccaaaatcgaggctttgataaggcggctgttttggaatacaaaagagacggtattcataagttcctctttcggaattttcttcacatccacgctacctatttttacaatgccgctctgcgggtcaaagaaccggcagattaaattggcaagagtggtcttgcccccgccggaaggccccacaaaggccactgtctgccctgtgggaatcgaaagtgaaatatccttgatgacctcattttttccatcatagctgaaatgaatatgactaagttgtaccgaagcatctttggggcactcgggcttctctggctccgcaaggggcctgagattcagcacgctgtcaatccgctgcaaagcgtcgtccacaatcatggcgttttcgctctggaacatgatacgggtgagggtgacggaaatgatgggcgtaatgataatataaaacatcaaatccagcagaaactccttggtaacgccgccttgggtaaaaatcagtccaccggcaatcagcgcggcaaagactccattgatagccgccgtgtagagcatcatgggcgcacgaagctccttggtataggcaatcacccacgctttatacctgtcaatggaatctttgaactttttgaaagagaagatggtctgcccgaaggttttaaccacgggaatccctcgtacatactccaccgcttcattggacatatcatcaagggcgttttgatattctttcattttatcctgcatccgctgtccggtcatcgccatcattattaaaaatcccagtacaaccggaacgaggctcaaaagtcccagccgccagtcgaacaccagcagcaggatgaaaaggccgcagggcgtggcgatagcgttggcgcggtcaggaagctgatgggctagataggtttcggtggcagcgctggattcgttgacaatcttgcgcagccttccgctgccgaactgctctgcaaatcccagcggcagcttaacaatatgctccatagttttaaggcgcaggttggtggcaatacggaacgcccctttgtgagaacacatcagtcccgcaatgtagaccaaaactgcgattaccgcaaacagtaccgccatccatccattatgggtcagattttgcgcacggctaaagtccggcgcagccttaaacacttcccgaataaccttccagatatagtagaagggcactaacgcaataaaggcgctaatggctgaaagcacccaggaagcgtaggtcagatatttgtggttgcctgcaatctgtagcaggcgtgacagattggattgttttttcaaagaagattcctcctatcttttatttatgataaagagaacacgagtgcgttcttcttatatcctcgtaagttagtcatcactaaccaaggggtaaaaattataggacgctactgccccataattttcatccatccggctgtataaaaggctcgcatttccttcacatagttttctgcgttttgaagcggcatctcgtggattatcagttcaaaaaaggtgtgaaacatgccggtaatcagaatatgctccagcgtagagtcaatttgcggggcaggccgccccaattctttcaaaacctttagataggcgtgggtgccttcaacctcaatttccaccattacatcaacaaggccggaaaactttgtaccttccgcacaacagagaatcagtttacattcctctaaatgttcataggcatagtggagcatatcaaacatacaagcgccggaaatatcgctcatcacttccggctgtcgctcgtggggaagatcggcaaattccttctgtgctttttgaaagcagttaagcagatacgcataatgctcacctaccaaagcctcgaatagttcttctttgcttttgtaatagccataaaaggctcccgtagtcatgccgacagatttgacgatattccgcagggaagcatccttgtagcccttttctaaaaactctgcttttgctgcctgatggattcggtttaaggttgtcaaatttccatttattttacgcgccccccaacataacactgttatatatcactgttatattatggcctgaaaagtagattttgtcaagaggaaagatagtcaaaaaagtgttttatgttgtcagacattaagtataacttttattgcagcaagaaaggtgtaacagcatagctgctatgctgttacaccttttgcagaaaaagatacgaagttatccctcaagcccccaagatcgccacctccggtaacgattgctcatcctacggacgctgtaaaattttcagtaaacaaaagaaaaactctatgcaaatggtttacccattcacatagagttttcttatttcccgttcacttggcataggtcagtattttgcaatacttctttataatcctctgccatttttcccgcctctttctttatcagtttcctgctgatcgctttcctctcactccagcccttgtatcacatcccagacttcttcatcaaatactctgtctttatataaaaacttcttatcttcctccgtgattttccgaaccaccctgcagggatttcccacggcaaccacccagtccggaatatccttagaaacaacacttcctgcaccaatgacagtattgcttcctatatgtaccccggggagaataacagtattgccaccaatccatacattatccccaatggtaacttcaattccatattcatacagggtattccttgctgtggggtgcaccggatgtccggccgtataaattgccacattcggagccatctgacaattatccccaatggtcacctttgccacatctataatcgtgcagttatagtttgcgaagaagtttttcccaacctcaatgtgagtgccataatcacaataaaacgggggattgatgcatgcatgttcagatttgcccagtaactcctttacaattcttccgatttcttcaaaatctgaggggtctgcagtattcagcctgtgcagaatttttctgcaaaccttctgttcctccatgacggattcatctgcaatataagccatcccaagatctcttcgttccccattgttcaatcgtttgtcctccttatccttgctatttcctaccagtcttacatagaacagacagcaccttcattctatcacaataatggactaaaagcacttttgatttgttacgctatcttttaaatggatcaactccagctttctattcacattggttttgcggtaaagactctgcaagtgtttttttagtgttgactcgctgataaagagtctgttagccagcgtctgattattctcttcagaggataacgctaagaagatttctaattccctcattgttaatccgtactcggaagaaaaagcaattgcacgatgcttagacttttcctccatagaatccgtcttcgcctgctcctgatagaaacgactattgatatgtttggagagcgactttaaaagaaacatatcattttctccaaaatcattcatatcatttgcccggtaaaggctcagtacacccagaggaatacccttatgtacaaggttggaatagacagaatatttaagattatagggaagatagcatttctgatatattatattatttctgcgttcttcttctgagagcaaatctgttatacgaaatacatcactttctgactcatcacacatccatttactcaaatcgttttgctccagctgcagatacaagcgctctaccggtgtataggtttcaggatagcagacaggactgcagaggcttttatatccgtctgaagttttgcatgtaagaaagcttgcaaaggtgcagggaatcaaagcctggatcccctttaacacgcaatttttcatttcatcaaactgttgcttactataaatagaataaacgatattattatattgaatgaaatcgtttctgttcatgtgaaaaccatccccttatccttcatgaatacttataattatacttcctgtaatatcattttgcaacaatacggagaagaccggaaccagaaaaggagtaggggtatcctcttttgctctttttctggacagtacgtaccatatacaactcaatgttcatattatacaataactttaacaaaatcaatgcattgtatgttaaaaatattatataggaggtatgtattatgataattggttgcccaacggaagtaaaagccggtgagaccagagttgcgttaacccctcagtggagtaaaacactgacggaacatggccacacagttatggtacagacacaggcaggcacaaaggcgggatttaccgacgaggattacaaaaacgccggcgccttaatcaaagaatgtatagaagatatctacgacaaggctgaatttgtagtaaaagcaaaagagttaaagccccaggaatatggactactaaaaaaggatcagatcgtcatgtcatggttccatctggcagaagatgttgatttcgatatgcttcattccatgctggacgcaggtactatcggaattggaatggaactgattaaacttcctgacgggactcgtcctactattaaacccatgagcgagattgctggttctctggcaatgcttgaagctattaaatacggacttgtagatcacggcggaagcggaactctgtttagaaaactgtccggactgccggccccaaaagtattaattttaggcggcggacatgccggcttaaatgcagctgagatagctttgggtcttggcctccaggttaccattgtagaaaattactggaagcgtattgctgagctgcgctatatgctccccgctgcagaggttgtctgctgggaggatagtactgtatataacttaatttccaatactgatgtgctgctgaataccatctatgccatcccaaatcagccctgtctcatcagccgagtagtagttcggggcatgaaaaaagatgctgtaatcattgatattgttggaaatggaattattgagaccatgcactatacaactttgcttgatcccacctattacgaagagggtatcctccattacaatgtggccaatatgccggcgctctgtccaaagactgccacaaaagctctgcttatggcttccggcccatatattcttgctattgcagataagggactgaaaagagcctgtgcagaggatccggccctgttccagtccgtatgtactctaaatggaaaaattgtccatgatgaagttgcccgcaatcacaatcttccatgcacaccttttaatctcggcatgctggattaattccggagaaaggagccatggtatatggataaaagggacaaaccaaaagcgcctccccgcaagccttatatatgggaaattattctcgcaatggttattctaattggagttcttgtatacagtgtagcagtgcttggaattgatgtccatattccatttattgttgtagctgctctcactgcgctgatagcaatacggatgggatatacctggcaggaactggaaaattctatactaaagtcaattgcttctgtcatgcaggcggtactaatcctcattatggtgggcatggtaatcggttcctggatccagggcggtattgttccctccctggtttattacggactgcagatgattcatccccaggtcttcctggtagctattttcctggtaggttcgctgtgttccatagccacgggaagttcctggaccatgatcggaacacttggggttgccgccattggtatcagtgaaggaatggggattcctttgcctctgacagcaggaattgtcatcggtgcggggtatttcggtgacaagctgtcgccactctctgatactccgaacctgcattgtgccattgcccgggttaatctatttgaacactgtaaaaacgtattcaaatatacgataccttctttcttgcttgcgcttctaatgtgttttatatgcagccggatttatgccccccgcagtaccggaggaatgtcctccattgcagagataacggagacgcttcatgactcttttgtaatccacccgctcctgattctccctgtactgatggtatttttaatgattgccctcaagattccggcaataccgggcatcttactgatggcagtcgtgggttcactgtgtgcaatgattgtgcagggtgcaaatctacatgatactctaaccgtacttctctatggctacagcggggatacgggaagtgaaattgtggacagcctggtcaccagaggcggtatggattccatgatgtatatcacctctcttatcctctgtgtcagcgcttatggcggtgtaatagatgtaacacgcattcttcatgttttggttgaaaagctcctgggcagggtgaactccccatccggaattatgatttcaacagcactgtgtggttttatactaaatattattgctgtggataattatgtatcagctgttatgacaggaaacatgctgcgtgaaaagtttataaggagaggcctttcccctcttaatctatccagatgtcttgcagaaagctgtgccataacatcacccttaattccttggaacacctgtgggattaccatgctggggatgctgggaatacctgtactgaaatatgccccctttgcgttcctgctttacattccaccgattatggtaattgtcataagtctgctgaaaaaaggaattatctatctaacaccggaagagcaggcagaactcttaaaaaatgatagcgctgcctaacagtttttaaaaaggaggtgccctgtctatagggcatctccttttttatcaaatatactcgggctttgaatgcaatataaaactctgaaaagaaaactattaatatgctgaaattacaaaaacctcccagaataaatatcctgggaggttatatagcatacatagatgctgataaacatataaagttgtccaaagattatctcttggagaactggggtgcacgacgagccgctttgagaccgtatttctttctctctttcattctcggatctcttgtcagatatccggcttttttgagaactggtctgaaatcatcgtctgcctgaagcagtgctctggcaattccgtgacggattgcaccagcctgtccggtgtaaccgccgccatgaacatttactaatacatcaaacttatcagctgtctctgttgccactaatggctgacgaacgataacttttaatgtctctaatcctaaatactcatcaatatctcttttattaattgtaatcttacctgttccaggtactaaatatactcttgcgatagatttttttcttcttccggttccgtagaattttgaattagccaatgttttttacctcctactaaaatgttaatacttctggtttctgagcttcatgcttgtgctccggtccagcgtatacgtgaagtttaccgatcattgctcttcctaaaggtcccttgggaagcatacccttaactgcaagctcgattactttttcaggtttctttgctaacatttctcttaatgtagtttctttcattccgcctacatagtctgaatggtggtaataaactttctgatctaattttttacctgtaacattgatcttgtcagcgtttacaacgattacataatcgcctgtatcgatatgaggagtatagattggtttattctttcctcttaataccttagcaatttcagatgcgagacggcctaatgtctgtccatcagcgtctactacataccattttctttcaaccttatctggattagccatataactgttcatggttttacctcctgttttacatatggattcaataattttctaacttaaaatctataatgtaaaataccttcgccggggcagggaccgggtattttcgcactacgtcacattgaaatattatattatactcacccacgtgtgtcaacaggttttttgtttttttgccacattttctgctaaatttacccagagagacctgtgaggtgcccctgttccaggtcagcaaggtgatatcataacctgtctgggattttcagcctctggtttcgtcactaaaataacgtactccaaccaatgtcagcccccgggcaggcgctgtattgccggccatcttccggtcccgggcctcaagtatctcctttacatactccggcggatactttccacatcccacttccatcagagttcctgcaataatacgcaccatattatagaggaatcccattcctgtcacccggataataatctcatcgccgttcttttgtatggtcagaccggtaacattgcgcactgtagttttcacctgtgcgccggtaccgcagaagctcttaaagtcatgctcaccaatgagatgttctgctgcttttctcatctgttccacatccaggggaacatacgtaaaatgagaataaaaccgttccgttggtatcggaaacctccggttgaggattcggtactcatacgtcttttcacttttctggtatctgggatgaaaatccagagggacttcctttgattcctgaatccggatatcctcaggcagtctctgattcagtgcgtaggaaaccttctcccccggcattctgctgttagtatcaaataccgctgcatttcccagggcgtgtacccccgcatctgtccggctggctcccaagacagagacaggctctttcagcagttcactcagatgccgctccaagacctcctgtatggtaaccccgttaggctgtacctgccatccgcagtacttagtcccgtcgtatgcgactacaatcataacacgcttcataaactacctccccaggatccggattactatactccccgccagatagagaagcataattccgtatgcggccagatccctggatgcatatcttagcggtttcatctgcgttctgccctcgcccccgtggtagcatctggcttccatagccatggccagatcattggcccggcggaacgccgagataaacagggggaccaggaggggaatcagcgcctttgccttcttgatcaggtttccgctctcaaagtctgcccctctggcaatctgcgccttcatgatcttgtccgtctcctccataaggatgggaataaagcgcagggcaatggacatcatcatggcaatctcgtgaacagggaccttaatctttgcaagcggcctcataagcttctccagtccgtctgtcagctggttaggcgtcgttgtaagtgtcatgacagaagagccgataatcagataaatcagccgtattgccatctttcccgcctgcagacaccctgcatctgttattttaaagatccagaactgcaccaggatgtttcccggtgtaagaaacagattaaaagctactgtaatcaaaagaatcataaagatgggcttaagcccctttaccataaatccaaagggcaccttggatattagaatcattgcccctaaaaatgcagtagccagcacatatccctcccacttgttggagacaaaaagggataccagaaaaatcagtgttccgataaattttacccggggatccaatctgtgcagaatggaatctgcgggataatattgtccaattgttatatctcttatcataatgctctactttcccaacgcctttaatatacttacccgggcttcttccaccgtggtcgccgtttcatctaccggtatgcccttttctttcagtgcatgcataatataggtaatctggggagctgcaagtcccattccttctaattctctgtaatgggaaaatacttccttgggcgcatcgtcaaacgcaaccttccccttgttcataacaataatccgttcaacatatttggctatgtcttccatgctgtgggataccagtataatagtaatcccccgcacactgtgaagttctgcaatctgatccagaatctcatctctccccttgggatccagccctgccgtaggttcgtccaggaccagtacatcggggttcattgccagtaccccggcgatggccgtcctccgtttctgccccccggacagttcaaaaggcgagctgctgtagaattcctcccccagccctacctgtacaagtgcctcttttgccctttcttttgcctcttccggggacagtccctgattctttggcccgaaacaaacatcttccagcacactttcctcaaacagctgatgctccgggtactgaaaaaccagcccaacacggcttctcagagatttcaggggataattctccccccatatattttctccgttgtacagtacaagtcctcccgtgggtttcatcagaccgttaaaatgctgaatcaaggttgacttaccgctgcctgtatgaccgataattcccacaaactgcccgtcctggatctccagattcacatcctccagggcatgcatctcatatacagtacccggactgtaggtataggttacgtgttctaacttaattgacatatcgcattcaccaactcatctattgttaaaattccttctggtatctgaagccctgacttcctaagttcatgggcaagaagcgtgacctgggggacatccagacggtagctttttaatgtatccacctgggaaaatatctctcttggagtaccctgcattacaatactgcccttatccataactatgacccggtcagcaaagattacctcctccatatagtgagtaatcagtattacggtaaccccttcttttttattaagctctctgactgcctgcaggacctcctttcttccgttgggatccagcatcgccgtaggctcgtccaggacaatacattttggccgcatagctaccactccggcgatggccactctctgcttctgccccccggacagcttattcggagaatgatgacggtaagcagtcattcccactgcattcagactttcatccacccgtctccagatatcttctgtgggaactcccatattttccggcccaaagcctacatcctcctccacaaccgtcccgataatctggttgtccggattctgaaataccatgcctgctttctgacgaatcttccagagttcctcttcattctctgtattcatatgatccacccatacagttccctccgtgggtataagcaggccgtttatatgctttgcaagagtagacttgccggagccgttgtgtcccagaacagcaataaactgccccgcctcaacgtccagatccacctggtcaatggctctgcttgtctcctccacctttccctcatcgttatatttcaaataatcaaacaccagtttgctggctttaataatacccatattaattcctcatctgcttctaggataaacttcactttattgtatccgatttgctctccctttacaagtgatttgcacattcactgtaatgattcccaggctgacacaggcaagtgccgcaatattcttaagggtaaatgcattttccccaagaaatacagaagacaataaaataccgaagacagggatcgtaaacccataaatggatacctgcccaaccgaattatattttaacaaaagcgtccataccgaaaatgcggcgctggagataaacgccatataaaacaataaaagtataccgggaagagtaaattcctttacctccccacccagcaccagaccgaacccgatcagaatcagccctcctgtaagcagctgataagcagtgatagtaaacgcgttgtccctgtgggcaaaagtttttacatacactgcagccattccgtaagccagacaggagatgagcataaatccctcccctgaaaaggaaaacccgcctcccaggccgccttttgagtaatttataataacaacgcctgcaaatcccagaatacagccgaatccctttttcagattcatcctttcgttcctaataaaaaaatgcgccagaagaatcgaaaagaaagaattggacgcagataaaatggcgccttttaccccggtaatgttggccagcgcaagataaaaaaatacgtactgcattgttgtctgtatcagtcccagtacagcaacctttccccaaatctcttttttgggaagaggcagctttcgggcagatcctgcagctatcagccaggtcatcacccccgccagggtaaaacgataaccagcaaaaagtatctggctccctgtgtcatcccccgcaatctgaaacagccggtacccgtttttcacacaggggtatgcgctcccccacagcagtgtgcagaacagagccagaaaacagatcccccaaggttttgtcaggatggcagtatttcttttttccatagttccccttctttcataaatccaagttttcgggccagtgcctcagaggcctgattctctctgtcaatccggcagaaaagttcctttatctcccgctcccgggcagcttctatggctatccggcaggcctcccagccatacccctgcctttgaaaggaaggacctatcatatatcccatttcaactcccatgatgccctcttcctcctggcggccgggttcaaatcccacctggcctatgatctctcccgtatctttttttataacagtccaaaatcccatgtcacacagatgatacatatattctctgtaggaaggaaatgcctccagttcttcttccgcactttctttcatccggcatccccagtctgccattcccggctcctgatacatcttccacaggaccggaatatctgcttctgtcatctccctgacagttacccttcacgtttccccgataaccactggctcctttcggcttctgtgatgtactttttccataaatccgccgtctatctcttcatacccttccactatgatctccgcagtactcagatcctgttcccctgagtcaggattatagtatcccacacagcagatccctgcggctttggcagcacggcagccatttgtggaatcttccacaacaatacattcctcaggagaaagccccagcagttctgcagtccgcaggaagatatccggtgcaggcttgggattcctgacactctcaccgctgcagagcacctgaaagtatgactgcagttccagagaccgaaccacatcccgaatataaggttccggtgacgaggaagctatggccagccggtatcccccttgcttaagacgtttgagaagttccggcaccccttcaatcagagggtatcctctctccttcatcaccttccatttgatcgcttcatgttcttccatcagctttctgtcattccggtctaccccataggcctcactgagaagatccatgagaaatccggctgtagatccgatacacggtttatatatctcataggaaagatcaacttttctctccttcattgtcattttccagatttcataatgcaccggctccgaattaatcagaactccgtccatatcaaatataatccctttcagcatacattctctcctgcagtttattctataataaaaccgcttttcctctgttttctccagaggaaaagcggcccttttaatttctcactgtcactctacggtttcacaatccttcttctcttccagaatagaatccataagctcccagatctcgtctcttccctgttttgtcgcagaagaaaacggaataacctgggtccccggaaccaattccagtccctggcgtaacattttaatatgcttttgtatctggcttctctttaatttatccagcttagtggcaatgataatcggctgatacccgttgtagcgaatccattcgtacatggttttatcattcttagaaggctcgtgccggatgtctatcagcagaaaaactgcttttaacatctttgagctgtgcagataccgttcaatcagatgcccccatttttctttctcagcctgggacactttcgcatatccgtatcccggaagatccaccaggtacatactctcatttacattatagaaattaatggtctgtgtcttacccggctgggaactggttctggccagtgccttccggttcatcagcgcattaatcaaagatgattttcccacattggacttcccggcaaacgctatttccgggcggtcattttcaggcagactgcttgtcacaccgcagacaatatccagggatacattttttattaccattttttcctccgttttccggactgctagtcttcttttcctgccagggcaatatccagaacctggctcatagtatccacataggcgatgtccaggccctgagtaatctcctgactcatctcttctacatccggcttattctgtgccggcactactactttcttaattctggcatttttagctgcaagcagcttttcctttagtcctccaatcggcagaacccttcctctgagcgtgatctcaccggtcatagccacatcggccttcaccggtgttcctgtaatcgctgatatcatagcagtcgccatcgtgatacccgcggaaggaccgtcctttggaaccgcgccctccggtatgtggatatgtaaatcattcttctggaagaattcaggttctatcttatactctggagcgatagaacggatgtaactgatccccgcctgggcagactctttcatcacatctcccagctgccctgtaagaagaaattctcctgtccccggcatcaggtttacttctatctggagggtatcccctcctacactagtccatgccagacctctgacaataccaacctcgtctgtcttatttttcatctgatacgtatacaccggtttgcccagatacgtatccagattcttcacagtaactgagaccttgttctcacctctctccaggatctcccgggctgtctttctgcagatctcaccgatctttctctccagacttcggacccccgcctcttttgtatacccatgtattatctctttcaaagctttgtctgtgagagacagctggcttttattcagaccatgagcttttatctgtttgggaatcaggtgttcctttgcaatatgctctttttcattctccgtatagctggtgacttctataatctccatccggtccagcagcggcttaggtatcgtctgcatatcattggctgtagcaataaaaagcacttcggagagatccaggggaatctctacatagtgatccctgaacttattattctgttcggagtcaagcacctccaaaagcgcagatgaggtatcccctttataatcactgctgactttatcaatctcgtccaggagcataagcggatttttcactcccgcctgctgcattccagaagcaatccttcccggcatcgcccctacataggttctcctgtgtccccgtatctcagcttcgtctctcacgccgcccaggcagatacgcacatactccttgtccagcgctctggctactgacttagcaattgacgtcttaccggttccgggaggccccaccagacagagaatgggactttctcccttctgcgtcagagtgcggaccgcaagaaactccatgatacgctcttttaccttttccaagccataatggtcagcctcaagaatctcatttgctttcttaagatcccggttatcctcagacgccttatcccagggaaggctcagaagtgtctcaatgtaccctctcatcaccgtactctcggcagcgccgctgttcatatttttaaaccggtctatctcttttattatcttttcccggatctcttcggatgcctgaagcttcctggcttcctccagaaattgctccgcatccgtctgggtgtgatcttcccccagctcctcccggatcagtttaagctgttcccttaatatatattctctctgattcttgtcaatccgctctttgacctttgtctgaaggtctatgcggatctccatgatctgaatttcattcgagagcactaggcccagcgcctcgtaccggtcctccagagaaattccctcaagaattctctggcggtcagtataaggcaggggaaggtggatagcaatctgatccaccagtctttctatgtcttccatctccagcagctgcgctgccagctctttgctaatcttgggattctcggtacagtatgtgataaataattccttcaggtttctgagcatggcctctttcgcattatcgcttagcgctgtcaaatcctgctggtcaaaggctgcaacttctgcttccagatatttatcattgttctctaatccgaggatctctgcccgttctaacccctctacaaggatccgcagggtattctttggtgcttttactacctgcttaatttcagcaatggttccgatcttgtataaatctgccattcccgggtcttctgcctccgggtctctctgggtaaccagatatattacctgatccttcatcatcgctgtctctactgctttaatagatttgtcccggctgatatcgaagtggacaatcataccgggaagaatcgtggttcctctaagggcgatagcgggtaatattctcattaagtcactcattctcgcacttcctattcttaagcggtttcgccttttcctcttttctttgcggaaacggcccttctgggcgtaggtgctccctctccccttgtaatttcaggctctccgtttccttccactacctcttttgtaataatgcaggaacggatggtatcgtccgatggagccgaatacatgatatccatcattgtattctccataattgcgcggagtcctctggctcctgtcttccgttccatggacttctcagcaattgcccgaagggcctcctccttgaagtccagttccactccgtccagctcaaacagttttttgtactggcgcaccagagaattcttaggctcctttaaaatcttcagcagagcctcctcatccagcatatccagagagacaactaccggcacacggccgacaaactcgggaatcataccgaattttacgaagtcctggggcattgcctgcttcaaaagctctcccacattctgtttttctcctgtgcgtatctctgcgttaaatcctatggatttggtatcttttctggaatcaataatcttatccagcccctcaaaagcaccgccgcagataaataagatatttgtggtatcgatctggataaagtcctgatgagggtgtttccttcctccctggggcggtacattcgctaccgtaccttccagaatcttgagaagcgcctgctgcacgccttccccggaaacatctcttgtaatagaagcattctcagattttcttgttatcttgtcaatctcgtctatataaataattccgtactgggcacgctcaatatcgtactctgcagcctggataattttcaacagaatgttttccacatcctctcccacataccctgcttctgtgaggctggtggcatctgcaattgcaaaaggcacattcagaagcttagccagggtctgcgcaagaagtgtttttcccgaaccagtaggtcccagcatcagaatattactcttctgaagctccacatccgtgcttttacctgccaaaactcttttatagtgattatatacagcaacagaaagtacttttttagcatcctcctgtccgattacatattcatctaaaaattcttttatctcctgtggtttcagcagattgatggatgtgtcatccacctcgtcatacatctcgaactcttcatcaataatctctgagcagatttcaatgcactcgtcgcagatatacgctccgtttggacctgcaattagctttcgcacctgttcttccggcttcccgcagaaagaacatctgatttttggttcatttccctttattgccatagttatatcctttctccagtctggcatacctgtgggttaagagctacataagacccccgctactttagcaggagtcttatctgaatgaattatctgtgctcaatcaccatatcaatcaggccatacgccttggcttcctcagaggacatataattgtctctttcggtatccgcagtaataacctcaattggttgtcctgtattggcagccagaatagtattcaatttcttcttgatcttcaagatatgttccgccacaatctcgatctcagttgcctgtccctgtgctccgcccgagggctgatggatcataatctcggcattgggcagcgccatacgtttgcctttggctccccctgcaagcagaaaggctcccatacttgcagccataccgatacaaatggtagatacatcactcttaatatagttcatcgtatcatatatagccagtcctgcggttacggaccctccgggactgttaatatacagctgaatatcctttcccggatcttctgattccaaaaaaaggagctgggcaactaccaggctggcagtcacatcgtttacttcttcgcctaaaaagatgattctttcttttaatagtctggaatagatgtcgtagtttctctctcccctgctcgtctgttcaatgacatatggtactaaactcatgagaactcctcctattcatattcaacacgcttttaaacctcttttgcagcctcggcaattaatgttacggcctcctgaacagccatatctttcttcatctgttctttctcgtaatctcccattaattcctttaatttatcagcttccatcttgtacatctcagccattttctgaatctcttcatctaacttttcatctgggatctggatgtcttccacttcagcaattttctctaataccagtctgctctggatacgctttaatgcctgcggtctcatctgctcctgaagcttttcggcatccaggcctgtaaactggaagtactgttcaatagaaagtccctgtgactggattcttcttgcaaaatcatccaccatgttgcgaatctggttctgtaccattggctcaggaatctccatagaagcattttcaattgccttatctactacggcatcctcttttgcgcgttttgcagcttcctctttctgtactgcaagctttgctttaatatcatttttgtactcttccagagtgtcgaactcggatacatctttagcaaactcatcgtctaattcaggaagctcttttaccttaatagacttcacagtgcatttaaatacagctgcttttccctttaactcttctgcgtgataatcttccgggaaagtaacgttaacttccatctctttcccaagctcagcccctaccagctgctcctcaaatccaggaataaatgcgccggatccaatggtcagaggatagtcctctcctttgcctccctcgaaaggaacgccgtccacagagccgtcaaaatcaatggttgtaatatctccattctccacagtcctgtcatctacatcgatagttctggagttgttctcctgctctttctttaattcagcttcgatttcttcttcttttacttctaaatcagccttctctacttccaggcctttgtaatctcccaatgtcacttccggcttcacagccacttctgctgtaaagataaatggctttcctttttccagctgtgttacatcgatttccggctgtgataccacatccagttcactctcttccactgctttggaatatgcttccgggatcagggcattggcagcatcttcatagaaaatacctgcgccgtacatcttttcaatcataacacgaggagctttacctttacggaaaccagggatactgatcttgtttttattcttaagatatgcgccctgaattgctttttctaactcttcagcagaaacctcaaccgtcagtttcgccatgttcttttctaacttttctacctgtaaactcatttttaaacaattcctccttaattctatgtgatacgcttaaaaaggggcttccagtatggcagcccctttttttcgttacactttcccatacttacagtcattaaaacagtatagcacaagcttttcaaaaacgccagtattttttcagacctaatcgggaaatttttatgaatacttctgccggaagccaggcagctcccagtcctctatattgtccgtcagctttgcatgtctgcgcagaaccgcgtacagctctgcattagtagcagcaatatagggatgcacatagaaaatattagccagctgcagggttactgtccccagcaggatccacaaaatgaaggacagatccaggacaaaagtattccatttctgtccatccatcataattctgctcaattcaaaagctcttcttctgtcaattttaggattctcactgagtatatagggtaccatgcggtactcatagcttttcacaatacccggaactaccagaagcagggtccacaatgcagtgaacaggtctacgcagaacatggttgccgcaatatttccatagctgtttgcaaatccatatgtaatttctcctacccgtgtttcctgctgtcggtttttcatgaaatatctggtgcatcccactttcagagggttcccgattaatatcctgaaacaaatcatcagcaccgaaaataccagtgggacggcatacagtataactataaacggggctttgataaatttggagaccatcttccccaccgcccccattttctccaggggacttagtgtctcgtctgccagccccttggcgctgtcaataaaggagttgtgaaacaggctgctcacaatgccggtcgttctctctgcctctccccggaaatgttctgcggccgtctcctgcctgtgctgtgcacctcctgcggagccagaattgtttccgaattcatttgtaaaaagaaaagctgcaaggcataccacgacagccccccagtaaaaccgggaaaatgacttttttgctctgctttttaattctaatctcgtccacataccactgtcattcctttacatgtccataaataatggattccttaatttcctgtgccttctcctcaccagccagcattcccgccagagcaagtgcaaaaggtattgctgtcccaacccctctgcttgtaattatatttccgtctacggcgactctctccgtagttacagacgccccgcgcagccggttttcaaatccggggtagcaggcggccctttttccctccaacaatcccaaatctcccaggatactgggcgctgcacagatagcaccaattattttcccttccttataaaagttgctcagctgcccggtaagcaggctgcatgctccaaggttctttgttccgggcatgcctcccggcagtaccagcatatccatcttcgaaaaatctacacgttctatcgtacagtctgcttctacttttattccatgagccccttctacggaaagtcttccatgaacggaagccatacagacatcctgatctgcccttctcagaatatctactaccgtcaggccttcaacctcttcaaaaccatctgccaggcatacgcatacttttgccatctgtttgtcctccttactttttccactattctatcacggtgccggataattggcaaccggcgcactttctgttatactggtcaaaaagcagaaaagagggatctaatttggaaatagaaagaaaatacctgatacaccactgtccgctttccctggatcagtactccagccaccggatacagcaggcttatctgtgcacggaccccgtggtgcgcgtgcgcaggcaggacgattcttatatccttacctataagtccaaaggccagatggttcgggaagaatacaatctccccctgaatcaggccgcctatgaacatctgctgcaaaaagcagacggcattgttttaacaaagacaagatatgtcatccccctggatgaggttctaaccattgagctggatcagtttgatgccccttacgagactctgtgcctggcagaggtagaattcccctctgtggaaatggcagaagcttttctgccgccgccctggttcggggaagacgtaacattttccggcaaataccataacagctatctgagtgcccccgattcacccctttaataaaggataggtaccccctcacgggtacctatcctttttctgccagcctcctctgaatttgttccatggtctgctttttcatcctgtcggcttcctcttcggatatccaggtttcctttttcgccacagactccacgatctttccatagcaaattgatatcttcaaaaatgtaaatgacaagactcttaaaaaaatgttcttacttttcctccatttaatacctaattccatcaagcgatacatacgactctccccttcctcaatcttcttacgttccaatacacctttattctgtagaattatgctgtttctcctgctaattattacattttaggattcattttgttgcattaaaagaaatctgcttttattcttgatacaattgctcctagattccatacttaactggaagattttaggaggctattatggattttcaaactaacctgcgctgtctacgcaaagcaaaaggacttacccaacaggagatggcagatatcttcaatctccagcgccaatcttattgtaattatgaaaatgggcaccgaatgccgcctatggacttgctagtagctatggccgatttcttctctgtatctttggacgttcttgtaagaggaaccgtggctctggaggaccagcataaccctacattacccgtactcacccgggaaactatttatattttgaccgcttaccagaagcttcctccgtccactcgaaaagaattgatcgattaccttacttttaaattagaacgtctctccgattaatacttattttatcatctgtggaattaatttgcaatataatatattgcaattgcatatttcgacaaacattgcgtattttctactttttcttttttttatagacaatatatctcataatatattataatgtgactatcttaatactgttggagggatctatattgaagaacaagaagaagaaaaagatgatggcccaaactgcattattatttgtgcagcaatggaagggggtctgttagatggaagcgttacaaatgccccactttggatggtggagtattctgcctcccctgatcgcaattattctggcgttgattaccaaagaggttctttcctctctgatcattggtatccttgccggcgctctaatctacagccacggaaacccgattaccacattagtcaacacgtttactattatgggtgataagatcggcggaaatgcaaacatccttatctttttaggactcctgggggctatcgttgttctggtaaccagggcaggaggatctgccgcctatgggcaatgggcgattcatcacattaaaacaagaagaggcgcaagtttggccaccgccgccctgggatgtctaatatttattgacgattattttaactgtctcactgtagggacggttatgcggccggttacagacgagcacaggatctcccgggccaaactgtcctacctgctggacgcgactgcggctccgatctgcatcattgctccggtatccagctggggagcatcggttgccacttatatctcagatgccaccgggggcaacggaatgactaccttcgtcaaaatcattccttataacctttatgcactggctaccattcttatgattgtcattatctgcacgacacgaattaacttcggcccaatggccagatttgaaaaaaacgccattgaaaaaggagatttattctccagtgatgataccataagcggtgctgaggtacaaaagggcaattccaaaggaaaagtaattgacctggttattccaatactggctttaattgtttttacggtcctggctatggtatataccggggggggctttaccggcgaagcttcctttacagagtccttcggtaattgtgactcctccctgtctcttgtactgggaagtttttgtgcgctgatcgtaactttcctgctgttcatacccagaaaagtactgaatttcactgaatttatgggcggtataacggaagggattaagtctatggttccgtcctttacgattttaattttagcctggaccatcggcggtgtgtgcagcagtgattatcttaacaccggaggttttatcggaaatatggtaaatgattcttccttccctgtgttcattcttccggccattatcttcctggtagcggcattcctggggtttgcaaccgggacctcctggggaaccatggctcttttgatacccatcggagctgccatctgtaccccgtccaataccgcacacctgctgttccctgtattgggaggcattcttgccggtgcagtttacggagaccatatttctcctatctctgacaccacgatactctcatccacaggagccggatgcaaccacattgaccatgtatccacacagctagtttacgcatctatcgtaactgcctgcgccttcgtgggctacctggtaatgggggttctgaacagcccgtatattcctttacttgttacttttattctgttaatcgctaccctgtttgtatgcgataagattggcaaaaagaaatatcctattgattattcttccgtaaaataaactgataaaaggtggacagttatctgtccacctcagactgtagacaaagtccgaggacaagtgcctaggattttcttcgccattgagccagaaaagtcagcacttacaagactttgaggctcttttttggtataatagatgtatcaaatacaggcggtgagatgcttatgatgacacagaatgcggataaaaaaagagaacagattcagttgttttgcatggatgacatggttccacagaaccatctgctgcggatcatcgacaaagcaatcgactggtccttcatttatgaactggtagaagaaaaatacagtcaggacaacggacgccccagtatggaccccgtcatgctgatcaagattcctttcatccaatatctttatggcattaaaagcatgcgccagacggtaaaagagattgaggtaaatgtcgcctaccgctggttcctcgggttggatatgctggataaagtgccgcatttttcaacctttggaaagaactatacgagacgctttaaagacaccgacctctttgaacagatattcgagcatatcctttctgaatgctacaaatttaagctggtagaccctactgaagtttttgtggatgccacccatgtaaaagccagagcaaacaataaaaagatgcagaagcgtattgctcatgatgaggcattattttttgaagatctgctgaaacaggaaatcaatgaagaccgtgaagcacacgggaaacgtccgctgaaagaaaaagaggatgacagcaatacaccatccggtggagccggcggcaaagaagaaaagacagtgaaagcaagcacttctgatccggaaagcggatggttccgcaaaggagaacataaacatgtatttgcttatgcagtacagaccgcatgtgataagaatggatggattctcagctatagcgttcatcccgggaacaatcatgacagcagaaccttcaagtccttatatgacaagataaaagggatcggaatagagacgctgataggcgatgcaggatataaaactcccggtatagcaaaacttttgatcgatcaaggagtcaaaccgcttctgccatacaaacgccccctgacaaaagagggtttcttcaagaaatacgagtacgtttatgatgagtattacgactgctatatctgtcccaacaatcaggtgctgacctatcgaacaaccaaccgtgagggatatcgggagtacaaaagctgtggaagtagctgtgcaagctgtgcctatcttgcaaaatgtacccaaagcaaagatcatgtaaagacggttatgcgccacatatgggaaccttacatggagatgtgtgaggagatccgccaaaccgtgggtatgaaagaattatattcccaaaggaaagaaaccatagaacgaatctttggaagtgcaaaggagaatcatggtttccgatatacacagatgtttggaaaagcccgaatggaaatgaaggtcgggcttacatttgcgtgcatgaatctgaaaaagctggccaggatgaaagagaaatgggggcttctagagggagaagccccttacacaaactttatttggaacgcaatttggttaataaaagaaaactggctctgggatacaaagcccaaaaccaatttgtctacagtctgaggtggacagttatctgtccaccttttatcagtctcccattaaaaaaccatatttcagagggtcatccttatctataatgacctgattgatcccggtaatatacgcacttcctgtaattttaggtactatcgcatcatagggacctaccttcgttgtctcaaccgcttttcccctgaaaagagaaccggtgatactctcatagatgaaatcttcgttcagccccagtcttcccttggaataaagggctgctaccttagcacttgtgcctgtaccgcagggggaacggtccgcctgcgcggccccaaagattactacattcttcagattagcttcttcctgtgaggaatcgccataaaactctaccaaatccacagaattaatatccagctccggatgttgaatctccatagtggcattgatcttattcaaaagtgccattcccagatcctgaaactctcggaggttctccggaacaatatcaaggcccagcttgtctgcatttacaagagcaaaaaaacttcctccgaaagaaatatcgaaggtaatcgggccgtatccttcaatctccgctgtcacagcctctttatataagaatgccggcacattacgaatagttacttccactgcctttccattctcaactttaatgcttgtgcggattaatcccgcaggtgcttccaatgtgacctccgtataaggctctttcacttccaccatgccagtctcaactaaaactgtggcagttccgatgcttccgtggccacacatattcagacatccgccgctgtccataaaaatgacgccataatctgcttccggatgtaccggcttcgtaatcactgctccaaacatatctctgtgccctctgggctccagcataagtgctgtacggtatttgtcataatttttttctaagaatttcttcttctcgatcatcgtctttccttccagttccggaaagccttccactacgattctcgtaggttctcccatggtatgagagtcaattgttgtaaaagaagtttcaattcctggtattttggatatccaatccataatgtgcctccctcttacaaaaaggacatcgagaagattcgacttttcgacatcctttgtcttggaccgtattctatactatagtctatattatgtttgctaaacagccatttgtcaatagttttttcaccttttccaaagggtttttttatactttttttagaatattcttacatgtttttttgtcgtttttttttgcttgacactttaggttttacatgctatacttacgaagtattttgaattaagattgatttcacatagttatgtaatcattttttgatttacattactatgtgtttttttgttttaggataaatataataataattttaaggaggtatctttcatgaataaaggtacagtaaaatggtttaactcaactaagggatatggtttcatcactaacaacgagacaaacgaagaagtgtttgtacacttttcaggacttgccatggacggattcaaaacactggaagacggacagtctgtaacatttgatattacagaaggacagcgcggtttacaggcagttaatgtttgcgttgcctaagtacaggtaattgtaagggcagtcataattacaggccaacggtactatgcttttttgaagcataaataccgttggcctttttatttgatgtagaaaaatgaagcacaaaaaaacccttgaattaacaagggttttagtaagcagataaggggagtcgaacccccctctccagcttgggaagctagcattctaccgatgaaccatatctgcattgacatttattattataacgcattttgcagaatagtcaatggttagtttttactattcttccccttctttcacaatttcctctaaaaccctgattaaatcgtgaagattattaatctgaacattcttttcaagtattatatttttcaggtctacagacaaagtctcaaacttatccctgacctggggtgccacataagacattttatcacctaatcctttctaacattattccccgcctggtccgtcctttctgggacgatcgtctttttctccggggaccaaatccatttcctttggaaactccgttacgatttcctgtggattgctgcggtgacagtcagttccgccctgttccggtaccagatttatctccatcataatattctcctttcactcagccagccattgctgtgccttgatacatttagtatgtgcaggatatttcattctatgttaggaaaagaatacaacccgggcagcatatactgtaaaaagtcatctctctgcttggcagaggaaaagaagggtatgttgtttaaaaatatcattatatcaattttggcggttattgccatgatgcagacaaatttctttcaccccagcacaaatatccaggcagtggtcactcccattatctggtactttattatcgcaggtacacttacctggctggatcttcagcgtcttgccaggaaagagcgggaaaaaaacgcctcagaaaacccagaaaataaaaaatagttcttttatttttttaatacctgtgctataatatacaagcatcggacttacgatggcaatggggcattggcgcagctgggagcgcgccacactggcagtgtggaggtcacgggttcgaatcccgtatgctccatgtaaatacagcattgaataaagctttctgcaaaataagaaaccgtccatactgggcggtttaatttttttgctattccccttgcagaagaatggtattttgcttctgtcacactttctccccttactcaatatactataccaggaaagatttacgggggactgtaatgcataaaaggttaattgctattgttactttgatggtaacggtattagctgctctaggcggatgccagaaagacacttctgcagataaagaggaaaaactcacaaaagttacattaaatgaagttgctcattccatattctatgcgcctcagtatgtggccattgaggagggatattttgaagaagaaggaattgatttggaactggtgacaggttttggcgcggataagactatgaccgctgtactgtccggggaagcagatattggtttcatgggggctgaagcttccatctacgcttaccaggaaggcgccaacgacccggttgtaaactttgcccagcttacacagcgtgcaggaaatttcctggtggccagagagaagatggataatttccagtggtctgatattaagggtaaaaacgtcttaggggggagaaaaggcggaatgccggaaatggtatttgaatatgtactccgccagaataatatcgatccccagaaggatgttgccattgatcagagtatcgactttggctctactgcagcggccttctcaggaggacagggagattttacagttgagttcgagcccagcgccactgccctggaaaaagagggaaagggctatgtagtagcttctgtgggtgtagattccggttatgttccctacacggcatacagtgctaaaaacagctttatggaaaagaacccggaaattattcagagttttaccaatgcactccagaaaggaatggtttatgtccagacacatacgccggaagagattgccaaggtaattgcccctcagtttgaagagacagacctggatacgattacaactattgtgaaacggtattatgatcaggatacctggaaagacaatctgatttttgagcagtccagtctggatcttcttcaggatattttggaaagctcaggtgaactggatgccagagtagactataatgatttggttaacacttcctttgcagaaaaggcagcaaaatagtcagcgtccacacttcatcatcttttgcatgccctccgttcaaataatgcacggagggctatttttacgctgttatcagtcattttttgcaggatttcattttatctctttctttttttggtattttaataaatatttaattgatatttttcaaaatgctaagtataatatgtactatcactatctgtttcgagatacagtgacggttatcagaaagaaaccttacattacttcttgtgtactttctcaagggcttctttccttaaagatttgcatttaacggcatcttagttcttacataccccaaacaatatgcacagacaataatgaaatatcctgaatgttctacgggcaatactcctgaccgcctcgaactgattcaatcctggggggaatgaatcaaattgcagggcgccggcagcaaaggatgtagtagacctgcagggatattttttgatatagaaaaaaataatataaaagtatgatggggtgtaaactcatgggcagctgccggtgatggtttacataatctaaggaggagaaacatgaatcaagtagcaaaaacgaaagatttccgtaaagtaatggtggcaaaccgtggggaaatcgctatccgcatcttccgggcatgctatgacctgggattgaacactgtagcagtgtactcaaaggaggacgaatacaacatctttcgggtgaaagccgatgaatcctatatgatcggcgaaaataaaagccccctgggcgcttacctggatattgatctgatgattgatatcgcaaaaaaacaccacgttgatgccattcatccgggttacggatttttatcagaaaacgccgctttcgccagagcatgcgaggataacggaatagaatttataggaccgccgtctgacgtcctggcacagatgggagataaattaagcgccaaagaaatcgctaagcgctgccaggttccgactataccaggttccaaggttcctctggcgaatgcagaggatgccgcaaaaagggctgtatcctacggctttcctgtgatattaaaagcctccgccgggggcgggggaagaggcatgcgccggtgcgataccgagcaggaagtgattgacaccttcccgctggtccagagtgaagccttaaaagcatttggatgcggggatatttttatagagaaattcttggaagaaccaaaacatattgaggtgcagatccttgcggataagcacggaaatgtggtacatctgtttgagcgtgactgctcgcttcagcgcagataccagaaggtggtggagtttactccggcacttacgctgagcagtgaaaagagagaagaaatctgcggtgacgcagtcaaaatagcaaaagaagtgggctatgtgaacgccggtaccgtggaattcctggtggataaacagggaaatcattattttattgaaatgaatccccggatacaggtagagcacacagttaccgagatgattacagacattgacatcgttcgggctcagatcctgatcgccgagggaaagacactggctgaaccggagattggcattaccagtcagaaggatgtgaagggccacggatatgcgatccagtgtcggatcacaaccgaagatcctcagaataattttgctcccgatacaggcaaaattacggcctatcgtacaggtggtggttttggagtccgtttagacgggggcaacacttacgcaggggctgagataacgccttactatgacagtcttctggtaaagataaccactcatgacagtacctttgagggagcctgcaacaaagccttgcgcgcattgaatgaaacccgtatccgcggggtaaaaaccaatatcggcttcattgataatatcctgatacacccaatgttccgcgctggaaaatgtcatacaaaatttatcgatgaaacacctgaattatttatcatcagagactccaaagaccgggcaaccaagatgctgaaatacataggaaatatcgtagtcaatgatcccacagcgggacagcgtatgtacgatactccccggtttccgaagctgaccggggagaagaagccgggattgaagcagctcctggataccaagggtcctgacgctgtaaagcaatgggttctggaccagaaaaagctcctgctcactgatacaaccatgagagatgcccatcagtcccttctggcgacccgggttcggacaagggatatggtaaagggagctgacgctaccgcagaagctctggcggatgcattttccctggaaatgtggggaggcgctacttttgacgtggcgtaccgctttctgaaagagtccccctgggaacgtctggatatgctccgtgaaaaaatacctaacatccccttccagatgcttctgcggggagccaacgctgtaggctataccaattatccggataatctgattcgggaatttatcaaagaatcggcgcgcagcggcatagacgtctttcgtgtatttgactctctaaactgggtgcccggaatggaagttgctctggatgaggtattaaaccagaataaaatcgccgaagccaccatctgttatacgggagatgtggggaatccaaaagatgataaatacacgttaaattattatgtaaaccttgcaaaacggcttgaaaaaacaggggctcacacactttgcatcaaggatatgtccggactgctgaagccttattccggatataaactggtaaaaaccctaaaagaggaaattggacttcccatacacctgcacacccatgataccagcggaaaccagatcgctaccctgctcatggccgcagaagctggtgtggatatcgcagacgttgccatttccagcatgtcctctctcaccagtcagccctctatgaattctctggtagctgccctggaggggcaggaacgtgataccggcctgagtcttgaccggctgcagggattgtctgactactggtgtgatgtaagagatcggtatggcgcctttgagggcggcatcaaatatcccgccacagatatttatgagtacgagattccaggaggccaatataccaatctgaagcctcaggtagaaagtctgggactcggacaccgttttgacgaggtcaaaaagatgtataagacggtagatactatgctgggaggtctggtaaaggtaacgccatcctctaaaatggtaggtgacctggcaatctttatggttcaaaatgacctgaccccggaaaccattgcagagagaggggaaactctgaatttcccagactccgttgtcagctacttcaaggggatgatgggccagcccgaatggggattccctgaagatctccagcgggtggtcctaaaaggagaagagccaatctcctgccgtccgggagaactgcttccgcccatggacttcgacgccgccagaaagcggttggaagaatttatcccatctcccaactggagaatggtaatcagctggtgcttctatcccaaggttgtggaagacttcctgaagaaccgcaaggagtacggttatatcacccggctgggcagccatgtattcttccatggcctggcagagggtgaaaccaacaaagtaaacattgaagacggaaagactcttgtaattaaatatctgggcaaaggcgatgcaaatccggacggaacccggaatgtgatgtttgagttgaacgggatacgcagagaagttgcggttaccgatcggagtgctaaggttaccgtagagtctatcccaatggctgatccctctgatctcagccacgtaggcgcctctattccgggtctcgtcagtcaggtacatgtaaaacccggagacaaggttaccaaaaatcaggttctggctgtggtagaggccatgaagatggagaccaatgtagccgccctgatggacggagttgtagatcaggtatacgtcaaagaaggcaaagaaatcaaagccggagagttgttgatgaccatccggtaaagataagagacgggcttcacagggaagaagcccgtctcttacttttttctgcggattgttcccaggaacagtccaatcagcagcagacagaacaatacaaatcccaggaaacttacccagggcattcccagtatctgaggcctgatgtctgtcagacagaatagccctgagccaataaacagcgcagctgccagaatcccccacaccaggcggtctgctgatctctgaaatacttcctgcatctttctgctgtccacaagatccagattcagctttgtctggccattcttcgttatattcagaagatctgagagctgtgcgggaatctccatatacttatccagtgatgtatacaaaagacgccctttatgcctgagttcctttttcagatccatctcacggaacagcagggaagacatatagttggtgaggatctggagtatattcacctccggtgcacaggcactcagggtgccctccatggtaatcatgctccttcccagcagggtgatatccgtattaatggctatgtgatgctcttttacaagatccagaagcttttcaatcagttcacccagtctcatattgccaaaatccatagtcatatatttgctcacaatatcatcaatgtctgtatagagccttgcgtgattcacccgctccttcgcctcaccgagcgccaggagaacattcttcagctcatacatatcattcttcagcaaagccataatagcccgtttcagaagcatcttattgtgctcggacagatgtcctgccattcccagatccagccatgccacctgtccgtcggagatccaaaggttccccggatgtggatccgcatggaaaaagccgtcctcgagaatctgcttgcagtaattctccgctgcttttcttccgatctcctccatgtcatagcccagctccgtcagacggtctgtctgatctatctgtacgcctccgatataattcatggtcagaagcttaggagttgtatactcatgatatacccggggagatgtgacgtaaacaatatccttctgattctcataaaacaagtcacagttgcccgcctcacgcataaaatccatctcttcctgagaagttttccagagctcctgaataatcattttgaaatcaatcagctctccggttcccatggtgactttcaggatcctcaccgcccgcatcatcagttcaatatcatttgccataatttcctttatggccgggcgctgcacctttagcacaaccttgtccccgtttctcagacgccctggatgtacctgggcaatagaagcagagccgagaggctctggagaaatttcagaaaacaattcctccgcaggccttcccagctctttttcaatgacatctttaattgtctcaaatggaaggggctttacctgtgtccgaagtcttgtcaattctctacagtaagcctccggaagcatgtctgaccgcatggacataatttgtcccagctttacatacgtaggccccagctcctcaagaatctccctcagttttacaggggtcagcccttttgttaaatgatgcttcttcagcacacagagtatttcgctcagccggccgctggaagtctccatgtctattcctcttcctgtttctcttcctctgcttcagcttccgtctcttcgcatccgcagtcatcgccttttgcttcctctgcctcctgtctttccaggttggcaatcttttcttttaattcgtctaactcttcttttgtcatatgatccacagctttcatggcatctctgtattcctttacgatgttaactgtgacatgatcatttactttctctttggcgctgcgtttcagctcttcgttgagaacctttccctgttcaactgtaatctcacctttttttaccagggtatccacaatctccttcgcagattccgcggtagtagccactgcgcctactcctgccaaaaatattttctttaatccttcgcctatctccataaggaccttcctttctttttctaaaattccgaaagtttcttcgtatgatacttctatagtataacatattatcagacgatttccccatttatagaaagattttatcaataatttatgattcttaccaatctataatctatttccagcactgggtgtttttaatccccagcttgtcaggatggaactgcggatcctttccttcttttttctgtctggtataatcgttcatgactttcatagatatcctgctcagaagaagaatacttacgatattcacaatagccatcagccccatgagcacatcggccagattccagacggtatcgaaattggcctgtgcacctacaaataccacgcccaccacaattatgcggaagacgaaaagcaggcccttactgtctttgatgaatttcagatttgactctgcgtagcagtaattcccgatgagcgagctgaacgcaaacaggaaaatagatactgtaataaagtgaattccccacacccctacctcggcattcacagcctgctggacatagggcatgccggtgagttcttgattgcccgtcccaaagttcagcagcatcattgccgtagtggtgcagattaaaatagtatctataaatacagaaagcatctgtaccattccctgtttcgcaggatgggaaacatctgctgttgcccctgcgttgggggcagatcccatacctgcctcattagaaaaaagcccccttttgatcccatacattacacaggaacctgcaaatcctcctgcaatggatttgaaatcaaaagcgccggcgaatatttccccaaatatgtccggaagcttccccagattggtacaggtaatataaagccctaaaacaatataaagaagcgccatcacgggtactattcccgaggtaataataccgattctctgaacgcctccaaaaatcaccagagcggtagccgccgccaggatcagccctatgatcatgggtacgctgctattggcataatcctccacataatactcaaaggctgagctcacattaaaggactgaagggcattgaatccaaaggcaaagcacgcaataagtaagattgaaaaaatgattcccagccaacgctgccccagtgcatactgaatatagtaggcaggaccgccccggaatacctccccgtctctctctttatagacctgggccagtgtactctctacaaaggcagaggcgcttcccactatggccatcacccacatccagaaaatcgcccccgcacctcccatggagagcgctgtggcaactcctgcgatatttcccgtccccactctggaggcggttgagatcattaatgcctgaaacgaagaaactcctgtcttttcctttttcttctctgtcagaacacggattgcctccggaaataaccgtatctgaacaaatttggtacgaatcgtaaaatatactccgctgatcaccagcagggcgatcaggatataaccatacaaaaaatcatttgcctgggcaatccactgatttattacatccaacattctttttcctcctgatacctatatcgatttgctgtctgcccctcattttctcccgattttggcacagcatcttttgtattgtattataaatcctggagaataacaaccatattagtacaatatcctcccatttccaacagttttatctgtgataactgttttttatccctctctcctgtgctataataaacaaagagtgctgccttattatggcatccaatcagggaggtaattatggattacagaacatatttaagaaactacccggacaaggatggctggttcggttcctatggcggggcatttttgaccgatgagttaaaacccgcatttgaagagatctcagatgcctatcagaccatctgccattcttcccagtttatcagtgagctcagaagaatccgccgggaattccagggacgtccaaccccggtatatcactgtgaacggctttccaaaatgtatggaaactgccagatttatctaaaaagggaagatctgaaccacacgggagcacataagctcaaccactgtatgggagaagggcttctggccaaatttatggggaaaaagcgtctgattgcagaaaccggtgccggccagcatggcgttgcccttgctacagctgctgctttcttcggcttagaatgcgagatccatatgggtgaagtggacattgccaagcaagcccccaatgttacccgaatgaagattctgggcgccaatgtcgttcctgtgacgcatggcttaaaaaccttaaaagaggccgtggattctgcctttgaatcttatgcaaagaattataaagactctatttactgcatcggctccgcattagggcctcacccctttcctctcatggttcgggacttccaggcggttgtaggggatgaagccagagatcaatttaaagaaatgaccgggctgcttcccgatgtggtatgcgcctgtgtgggcgggggcagcaattccatcggaatgtttgtgcctttcttagaagatcctgtggatattgtgggaatcgaacctctgggacggggttcccatctgggagaccacgctgcctctatgacctatggggaaaagggtattatgcatgggtttgaaagcataatgctgaaggatgaaaagggagagcctgctccggtttattccatcgccagcggactggattatccctctgtaggtcctgaacatgcatttctccatgatctgggaagagttcaatatacaactgtggatgacaatgacgccatgaaggcattctttgagctatcccgctatgagggtattatccccgcaattgaaagttctcatgcagtagcctatgccaccaaaaaggctcaggaaatgggacagggttccatccttgtctgcttaagcggcaggggggacaaggatcttgattatgtagtagaacattacggatacggagaacagtttctatccaaatagacagacttggagggattaccctcccatctgcatttcacagaaaaaagaggagccaccgaagttggctcctcttttttctattctgcaatccccatcagatcgcagagggacagcaggtaaatctgccccgcatttttcacatcctcgatatccacggtttcattataggaatgaattcctaccgtgttggatgggccgtactgaatggttgggatgtctttcacacggtagtcccttgcatcactggatgcccactgatacgcgggcagcacttcatccttccaaagcgcctccgcatgtttcttaattgcttctacaataggggcatcaatctctgtatagtttccaaaggtctggaaatccagctcgtactctacgcctgtaacgccgctcttctcaatgacctttttcacacagtcttctatctctttggcacctactccaataggaaggcgcagatccacggtcacctcacagtaatccggcaccatattgggccgggttccacctttgatcatccccacattggcagatacatggtcaatcacgtcccctgtgccggctccgtttttctgatctgcaatcagcttagagttgatcagggcctgggcctggctttctttatagcagccctcgatctccctgagcatatttatattctccagcacttttataagcttcaggatggcattctctcctttaaagccggccagacttccatgggcagattttccgtaggattttaataccagatccactcttcccttttgtcctatctcaatggtgttgtggcctgtaggctccgccaccagacaggcatctgcgttttccgcatatccgttggcacacagccacttagtgccgaactggccgccgctttcctcgtcagacacaatatgaagacgaatgtttccgttcaattccaccccggattctaccagaatcttcattgcaaacaagaccccggcaacgccggctttcatatcagaggttccccttccaaggatacacttatctgtgatctctccggagaaaggctcaaaatcccactgtgccctgtcccctgccggaaccacatcgacatgtccgttcaaaataacgctgaagccctcatcttttccgatcttggctactacacagggaaagtcagggttgcatcccacttcctcacagggaatacccgcctcgctcagataatttttgacaaaatcaatcacgcctctctgactgcctatgggattctcacttggaattttaatcaaatccgaggtgagctttatgagttcatccagtttgctttttgccagttccaatacttcatctcttgatttacagctcatgttccacacactcccttttcataatttggcttctttatttatcatcgaataaaaagcaggctacacggtgtccgtcacccacgtcttttagctgcggagcatccgttttgcatcgttccatacatttcgggcagcgctttgccagaggacatcctttctgctctccaataggacttggaatttcaccggaaagaacaatacgctctcttttttcaaagggagattccgggggaatcgcagatagcaatgcctgtgtataaggatgcagcggattctcgtaaatgctgttggcatcgcagagttctacaattcttcccagatacatgatggcaattctgtcactgatgtgtttgattacactcaggtcatgagagataaacacatacgtcaggttatattcattctgcagctggttaaataagttcagcacctgtgcctgaatggatacatccagagcggaaaccggctcatcacaaactatcagctttggattcagtgccagggctctggccacgttaatacgctgcctctgccctccggagaactcgtggggatagcggtgtacgtgctgcacatccagtcccacagtctgaagaagctccagagctttcctgctcctttccgctttatcggtaactaccttatgaacaatcattggctcttctaccagttttcccgctgtcatacggggatccagagaagaaaacgggtcctggaataccatctgaatatctctttttagattcttcagctcctcttttttcagttcaaagatattccggccattgtactccacactgcccgctgtcgctttgtgcagctgaaccaggcattttccgaacgtcgatttgccgcagcccgactccccgatgatacccagggtttctccctcatagatatccacagatacatctgtcagcgcgtgaagaatctgaggctgttccccgaacttctgtgctctgatcttgaattctttggtgagattcctgacctttagtatcactttcttatcactcatcgcggttttcctctcctctcaccagtttattctctttgttctgcctgtggcaggccacaaaatgtcccggttccacttccaccagctccggcacctccttgccgcacctctctgtagcgtagggacatctgttatagaaattacagcatttacctgtcagacgcagatccggggggacacccggtatggtattgagctcgccttttaccgtatcgctcagcttaggcatggaatccagcagcccccaggtataggggtgcagaggctgtgcatagagtgttttcgtatccgcatactctaccgtcttgcctgcatagagaaccataaccgtatcgcacatcttccagacaactcccaggttatgggtaatcaggagaatagaggtatccatctcatcctggagttcctgcagaagttccagaacctgtgcctgcactgttacgtcaagagccgtggtaggctcatctgcaattaccattttcggcttgcagcatacggccattgcaatgataactcgctggcacattcctccggacagctcatagggataggattccatccgtttttccggctgtgggatcccaactttcttaagagcctctactgccatctttctggcttcttctttggatacatcctgatgggcacagatcatttctaccatctgattgcctatcttaaataccggatccagagaagtcatagggtcctggaagataaccgctatatccttccctctgaagttcagcagttcttttttgttcagctttataatattttttccttcaaagtcgatggtgccctccactatccttccgatttttggagggagaagacggatgatcgacgaagcagttacacttttgccggatccggattctcctacgatgcccatggtctcaccttttttcagagtaaagctcacaccgtctaccgccttggacacaccgctggccgtgaagaaatacgtctttaaatctttaactgttagtaaattttcactcatattttcgtcctcactgttctttgctttctgttttcctgttacttcttcatcttaggatccagcacgtcacggacgccgtcaccaaaaaggttgaatcccagtacggtgataaggatgaaaatacctgatatagttgcaatatgcggagctgtattcagacagtcctttccagctcttaatatatttccccaggatgcggttggctgtgaaatccccagtcccaggaagcttaaggttgcctctgatataatagctcctgctacattgagcgtagcatatacgataataggagaaatggtgttcggaagaatgtggcggaagagcattcttatgttagatacgcccagcacccgcccggcattgcagtactcttcgttttttacaatatgtacctgtccccggacgactcgggcgaagctgggtacatttccaatacctatggccagaattacgtttggcagtcctgaccccagaattgtcatgagaataatagccagaagcacaaagggaaatgccagcataccatccataaggcgcataacaactgcatccacggcgcctcccagatatccggaaagcagacccaggaggatcccgatgatcgcgcctactatggtgcccccgatagccgcaatcagtgaaactctggcaccgtatacaatccgggaatataaatcacgtccaaactcatcggtcccgaaaatatgtcccttctccccaaagctcagataagtctcagagggcttaatcgcattgggatcgtgggttgcgatcaggggggctaaaatggccatcagcatcataaatactacgattacaagcccgatcatagctgtcttatttcttctcaatttgttccagacattattggcccttctctctcgcttaatgagctgagaatgggcttctgcgcctaaaacctctgcggttgccgtatttttctgctttgccatttagttgcctcctttcccgctttcatagcttacccttggattgattactgtatatacaatgtccacaatcaggttaatcactacaaacacgattgctgtaaacaggacaacaccctgtatcagtgcgtagtctctgttatcaatggcacttacaattaaagtacccattcccggccaggagaagatactttctgtgagaatagcccctgtaaacgcagatgccagctgaaggccaagaacagtaacaatggggggaagcgcgttcttcagcgcatgcttccagattaccaccccttctctcaagcctctggccctgagcgctttcaccgcatcattattcactacctccagcatactggagcgggtaattctggcaaaggtcgccatagggatagttgacagacagaagcagggcaggatcatgtgacttacaacatcccagacacccttggccatgctgcccatacccatcgccgggagccagcccagattaacactgaataccagcaccagcatgaggcccagccagaaaataggcatagagacaccaatgagggcaagtaccataaagatatagtccagaatggaatactgcctcaccgcagatacgatacccacaatcatccccagtaccagcgcaattaataagctggtaagggtgatcaccagtgtgttgggaatcctctctttaattagctccaccactgactggttgtaagagtaggatctgccgaaatctccttttaaaatttgtttcagataaataacgtactgctcccccttgctcttattgagtcccagttcttcctccaactgctccacagattctttcggcgcctgggggcctaacatagtaagagcaggatttcccggaatcatacgggtcaggataaaagtaaaggttactacaatcagcagggtgggaatactttgcagaattctttttacaattgtctttaacactaattttcaccaccgtttcttttgttgtttattatgcgaaaaagacggacgtagtgaaactacgtccctctttatcgtcgataatctctctaaattattgtactacccagacattctcctcagctgtacaaagtttgattgtaccatcagctctctgattgaagtcctgcaccttaggattgatccccaggcactctgccgggttgccgtagaagataccaggattatcatctgtaatgattttcagagctttcttgtacatctcagcacgcttcgcctgatctgtctcaatcaatgcatcagataataactgatctacttccgggttgctgtatccctggccgtttccaagagttccgatagcggaggttgcaaacatcttgtcaaagaagaagtatggatctggataccaggaccaggccatagcaaatacatctgcttttccggatgctgctgtctcactgaaggtaccccactctaccgtgttaatcttcagttcaacgccgattgcctgccagtaggactgcagtatcgttgcagctttctgacggaaagtttcatttgtaatatacatatttaaggttatgccatcgccgtaacctgcttcttccagcagcttcttggctccatccggatcgtaggacggaacatctgcttctacagattcgtcatagccccaggatgctctcggaagaggaagacaagccgcttcgccttcgccgtactggtatacaccggcagccagttctttgtagtcaactgccttgattaaggcttctcttacctttgcatctgcagtgggtccatttaccatgttaaagtaagcgtatccgatctgaatacctgccattttttccaagttcacagtttcgtcttcagcaacgatctttacagtctctccggtaagctgtgtggcaatatccacatcgccggttctcagagcgtttacttcctggttggcatctgtgattactttaaagattacagtatccaggttcggctcaccaataaaatacttttcgttctttttcagcgttgtctgctgatccagttcaaacttttccatagcatatgggcctgtaccaactaagtggttgccgaactcttcgccccagccttccacttcttccttcggtacaattgcatttcctgcattagtcagagcggtaaggaatactgcgctgggagctttcaatgttgcttttacatgggtttcatcgatggcttctgcatgatccagcatgtccagacggttcatagcggattcctgagcagaacgattcatattatatgccacgtcctctgcagtcatcagtcttccgtcctggtattctcccggctggaagtatacatcgtcgcggatggtaaatgtatattccataccgtcatcgctgatgctccactctgttgccagggagggcagaatctcttttaattctttgtcatatgttacaactgtgtcgcacacctgataaataatctgtgcttcgtatgtacccgtatactttacagggtccagatttttgggggaggatgtcagtgcaatcttcagttctccaccctttgtcacttcttccggtacttcgattgtcgcctctttattcacaatctctgtactctcgccgctgctttcttcggttgcagcgctgtcgtccttggtggcggaatcatcgctttttttattaccacagccagtgaaagcggtcatcaccatagcacctgcaaggacgagtgctatccatttcttcttcatacttacctttcctccttaagaaattctcacaataattttggaaccttccctcccacctgataaatgctcggtataaactgctgaaatatgcaggataggaattttcaactttcattgttcttaaaattatacattgtgatttcatagaaatcaagcattttcacctaaatatgaataatttagactttgtcctgtgaaatttttcctgttttttttatttccgttaacatttaaaccatgattttcacaaagtatattgacattttatgtcacttctgtaaacttagattagtactattaacgccgtttccggtttttcagtgtatgaaaatctgccggccacggaacgtacaaggaggacaatgatggtattaaagcaagtattagaagtattcgaattaatggacaagcctcaggcaaacggaaaagaaattattgaactgctgaaagaaagaggggccacagaggtctctatggaaacagtcgtgggcgaacgcggcactactgacagtattaagattctcatcgcaggatccgaaggaaagactgcaggaggaacggcacccacgctgggaatcatcggccgcctgggcggtctgggcgcccgccctacgatgaccggctttgtctccgacggtgacggagctcttgcagctgtggctgcaggtctgaagttagctgagatgcataccaacggggatatcttaaaaggagatgttattgtctccacacatatctgtccggatgcacccactcaggaccacaaaccggttccctttatgaattcccctattgatatggctacctgcaacgcaaaggatgtggatccccggatggatgccattgtatctatcgataccaccaagggaaataaagtaattaatgtaaatggttttgctatctcacctaccgtaaaagagggctatattctgaaaaccagcgcagatctcctggatatcatgacccgtgtgacaggaaagcttcccgcagtctttcccctggctcagcaggatattaccccctacggcaataatgtttatcacctgaacagtgtgctgcagcccaccacagccaccgatgcccccgtggtaggagttgccatcactacggaacagcccgtggcaggctgtgctaccggagcaagccatcccatggatgtagagagcgccgcacgctttgccatagaagtcgccaaatcctacggccagggagagtgttccttctatgatgaagaagaatacaactatctcctgaagctctacggagatctgaaagtattccagacctttggcaacatggacaaataatgcacagcgcggtaatcctatgaaaaagacaataaaagtaggggctgttactatagggcaggctccccgtgtggatattaccggggacattcgccccatgcttgccccgcatatagaattaattgaatacggtgctctggatccctttagttttgatgaggccaatgcccggtttgcaccgggcgaaggggaatctgttctggtttcccgcatgcgggacggcaggcaggtaaccatgtcagaagaggcagtgatccccctggttcaggactgcatacggcgtgcggagagagaaggggcggaggcaactgtcttgctgtgcactggaaaattccccgagttttcccacagtaagcttttaatcaccccccagcccatcctgcatgctctggtacaaaagctgtcgccggataagcccattggactttttgtaccggattcgtctcagattgcccaggtgaaggaatggttttctgccagcggcattgcttttgaaccagtggtagcctctccgtataaagaggctgagcttatggggcagcgggcaatggctttaaagggaaaagacctggcttttgttcttctggactgtatggggtacggatgcgggatgaaggaggatatctatgcctcctgccagctgcctgtgatacttcccagaacctatattgcacggctgctgaatgaattgtttgcataaaaaaggaatggaggcctatacaagtctccattcctttttttatgcattcagaggatatctctctgtaagctctttcacaattgcttttgctttctctttattgtccggacactgaatcatcaaagatactgcctcagctatctggtccatatctgcctcctgcagacctctggctgtcacagctgccgttcccagacggacgccgctggttacaaacggtgactccggatcatttggtatggcatttttattgcaggtgatatttgcctcgtccagtaatttctccattgcctttccggtgataccggttccccgcagatctaccagcatgagatggttgtcagttccccctgacacaatatggatgcctctctttagcagcccttcgcagagtgctttggcattcttcacaatgttctgctggtattctttatattccggctgcagagcttctttaaaacaaaccgcttttgcagcgatcacatgcattaaaggccctccctgaattccagggaacacagctttgttaaaattaaactgctttgcaacttcattgctgcttaaaatcataccgcctctgggtcctctgagggttttgtgagtggttgtggtggttacatgggcgtatggaatggggcttggatgtacaccggcagctaccagtccagcaatatgtgccatatctaccatcagatatgctcccacctcatctgcaatctcccggaagcgtttaaaatctatcacccgcgcatatgcgctggcccctgcaacaatcagctttggttttgcctcaagtgcaatctctcttactctgtcatagtcaatcacgccgtcgtcattgactccgtaaggaacaacgttaaaatatgcccctgacatgttggccgggctgccatgggtcagatgtcctccatgggccaggttcatccccatcaccgtatcccccggcttcaggatcgcgaagaatactgccatgttggcctgggcgccggaatggggctgcacattaacatactcacatccgaacagctctctggcacgctctattgccagtctctctacaacatctacatagtcgcatccgccgtaatatctctttcccggatatccctcggcgtatttatttgttaaaggacttcccatagctgccataacagccttgctcacccagttctcggatgcaatcagttcgatatgggaattctgcctgtctacttcttcttttatcgcctccgcaatctccgtatcaacggccttaatctcatcaaatgaatacatgatgttcctccttaaattctcccttttagtaacagcatcaaattacattatatacactttactactgcattgcaataagaaaaagacaaatatccgtcccacaaatacactctctctgttttcaccatttttttgatttttttcgagggtttattataatttttgcactatcgtttcgtttgactattctaaaataatttgttttaatagagatagcaatacattctacataacaaaggagagttgttctatgaaaaacttcgaatattttgcccctacaaaagtaatattcgggaaggatacagaaaaccaggtgggagctctggtgaaagcgcagaactgtaaaaaggttctggtacattacggcagtgagagcgccaaacgttccggacttctggatcgcatcttttcttctctcacagacgcaggggtggattatgtcagtctgggcggcgtagttcccaatcccagattatctaaagtatatgaaggaattgagctttctaaacaggaaaatgttgattttatattagctgtgggaggcggaagtgtcatagactcctcgaaagccattgcctacggggtcgctaatcctggcacagatgtatgggagtatttcgccaagacggctcaggcaaaggcttgtctgcccctgggatgcgtgcttacaattgcggcggccggaagcgagatgagcaattcctgtgtaatcacaaaggaggacggatggattaaaagaggctataacgatgacatcagccgctgccagtttgctgttatgaaccccgagcttacctatacccttcctccctatcagacagccagtggctgtacagatattcttatgcacactatggaacgttattttgtcccatttgatactatggagctcacagacggcatcagcgaggttttaatgcagactgtaatctgcaatgcccgaatcctgatgcaggatcctgccaactacaacgcccgtgcagaagtcatgtgggcgggaagcctttctcacaacggcctgaccggatgtgctaccctgggaggcgattggtcctgccatcagctggagcatgagctgggaggcatgtttgacgtagcccacggggcagggctggccgctgtatggggcagctgggcccgctatgtctacaaagaatgcccggaacgctttgcccagtttgccacaaatgtcttcaatatctcctgcgacggcaacgattatgaaaaaacagcccttgctgggattgctgccatggaagacttcttccgctccattcagatgcctacatcaattcatgaacttgggattgacgtaaccgatgaacagattgaagaactcgcttataaatgcagtttccaggataagaggactattgggatgatgaaggtgctgaagcgggaggatatggtggaaatttataagatggcaagataaattatagttttgtgtatgtaaagttcgagataaaatagtcggccagcgcagcgttgcagacggacggatataggagggagcaccggggggacagggccaggccaggggccggggtatagggacaagtcagggaggttaagcggagtgagccgaagatccagtccaccagctgattaacgaggaaggctttcctgacgagtttagcagctggtaggacttagctgaggggaacggagcctcgagctgacttgtccctataccccggcccctggcctggccctgtccccccggtgctccctcctatatcctggcagagactcacttcacattcacggaaaacgggcggggaaggtcgaacgttgtacacttttcctcttgtttcgcactattggtggctcgatgttttggataaatagctcccccttgaacttccctatacccaggttagagaaatcccgcggcagcgggccggctggttcgggcgggagggaggcttaagttccgcggacgattccgcaggagtgactagagagtcttaggcaaaaccgggattcacgctggagattttttcggcagtccaggccgaaaaaaagtgagcatgtgcagagaatgcacatcaagcattctttgcacatacgaacggtgctccggcggggattccggttttgtcttagactctcttcgcgacggaggtgtccccggaacttaagccttcctcccgtccgaaccagccggcccgctgccgcgggatttgtctcaccgtccccctgccaccccatgccttccgactgggcagtctcaagctttggaagttaaatcccaatttcccctatgcgcagaaaaagaaacgccgcactgcagccagtctcccgcctgtattacaacgtctccatttcttcttaacatacccctacgattgaacggcagaccggcttataatcttagcctcggaacagctttccaattcccccttttggaagataaaggtctgctccagagtttcagtctcccggatatggtctagactatatgcaatatacttccccttgtaattctctatttcctgtaaatcttccgagtgatacccaagtaccagatctgccccttcttcaatcgctgcatgtcccagttctctctgctgttcctccgtattatccgctccccagttaatacagagaataaccagctgggcatccatatttcttccggccagtatattcttttttattgcttcccggcttcctggtatcccatctgctgcatcaatccctgtgaatgcaatttttattcccctcacctcctttacagtgactctgtcatagccaaaactggtgatacctgattttgtaagatggtgcactgtgtccaggtatccttcctccccatagcctttgctgtgactgttagcaagattcactgcattgataccgcccttgtgaagaagttctacctgttttggagatgctttcacggcatccttactttccttctccaggtcctcttccgtcagaacgctttccaaatttgtgataataatttctcccttttcggaggcaagattcagatgtttcagctttgcagcagcttcttcttccagactgcagcttggaatagcgcgtagtgtaatggaatctgtatactcctttgccgctgcgactgctccatcagctggttctccaggcatactgtttaccctgagaaaatgaaagaaaaaacaaatcatagctcctgcccctgcggccaggaacagctttaacattttaaccgcaagcgcccttctctgctgctgcctgattctcggattaccgtattttgattttctaaccacttctttcatctgaagtcaccccgcctaccttttgccggtccgaaagggaatcccggcgtttcttgctttgactcccaaagtataccatttttaaattaacatactgtattatatcttttactttttgtccacgtttgtataatatattggttacactgctgttacaccagggtcagggttttttacaaaagtaaaaaatatatttcaaaatttcttcaatttattaataagttatgccagaatatactgaatacacaaaaacggcggggaagcatcttatggctttcccgccgtttttgtgtattctaaatctggccgcttaacttttctattttttccataatccttgttttctcatccccttccgccggcgtgggctgataattattccggcttgaggaggaagatatggaacatggaataatattcactgtctcatcctcctggagcttcccgtccagaaaggtaaaggtctgctggaaaatcatagtgtccttatcgctgggatttttatttccgccgaagcagaaatttcccaagctgtatacaattttctttccattataggtttcaattccctgcaatacatgaggatggtggcctactacaagatccgcaccattgtctactgctatgtgggcaagatctttttgtatttcattaggcacagtggccctttcttctccccagtggaaacttactattacaagattggcaccctgttcttttaccgccgcgatgtttgccttcagctgctcttctctctccatcccgtcggctagtacgtagatacccaccaggccgaccttcagccctttgatctccatcactgcggttttgtcgtatccaaaggttgtgatattcgcttcctccagatactttaccgtatcctcatagctggactctccataatctttgctgtggttattagccatgttggtagcctctaccgaaccgttggtaagaatatccacataggatgggtctcccttaaaggcataaagcttttctgcccggctgtctgaggtggtaagggttccctccatattaacaatggtgaggtcatcggcctcgaatatattttttacattctggaagaaatatgcgcccccctgttcattgtaatatgcgttgaggctggtactctggtcaaatccttcgtctgtacccaaggtacagtccccggcagtgctcacggtaatctgaaccggctctgccttaacagaatcttccttcttttcctcttcctgaccatctacctcctggctgtctgcagccacagcccctccttttttccctgaggactcctctgacttggtggcacagctttttactcccattgaaatagccaaaataagaattacaaagaggatacctcctccaatacccaacagaatcttttttcttttatactcttttcccttaaatctgtatctggattttctcattttatctcctggtattctatttagcttttttggctccttacttttgataaaaaaataaatgcccagagccggaatcgaaccagcgacacgaggattttcagtcctctgctctaccaactgagctatctgggcattttgcggacgccttcgcatcacacatttggaataataacacaattttcattaaatttcaatacccaaattgttcttatctctgcgctaaagctcgtaaaagaaacgttaacagggcgctgtttagcccatcttataatactggttccagtgataaatgttccacgaattgatacgataaatgaataaacaggcggactttctcgtcattcagatctgcgtctaaaatcgcttcgatctttctcagtctttgatacaaggtatttctgtgaatatacaggtttttaaccgtcaatgccacattacgctcacattgaatatataccctcagggtatgcagtagatccgtttgattctttgtatcgtaaatatacaactgtacaatacccgggaaacacagatgtctgccgtcaatcctgctggttccatagtggagaaagtaataaaatacataatcccgaaagtcatagcaccactcatcgggggcatactttgttcccatctccagtgctccaagagtctgcaggtaatagcttggaaaggtgtgaaattcaaagaagtcataactaattcccacacggaacactccctcagttaaaaaagaggacaaccagtaaatgagctgctgccgctccaatccctgttgggtcaggttcaccagaaaaataatagcatcatcgtaataaaaggcaaaacttccaggaaactgcagttctaaattagtgcatacattgtagtatactacgccaaccttatcccaccggctggtttgataggtcatacagatataagtatccgtatttttccagttcatagagagaagataacggtcaatgcacgcttgttccatctgatgattatccaataattctttcaaaaaattttcaaatctgactggatgacctgtatgaatataatttttattaaatgtcaggtgaatgaaatctgcaaaatatttcgccagaatgcggtgactttccatcaacggcgcttgcgtctccagcacagccaccgtaatacgcagcttttttttgacagatgctaagatcatattgcaggggaaatagtcctcagagataaaaaaaatgccgtcatcggcttttttatgtatatattccggagaagtcttgatcgtgttaatagcatccagaggcaggattttggagcctgaccaggggtctaccgaccacgtaattccgggaatctcatagtccagattattcataacacaataattctgatcaaagataatgactgggttattaaaaagctcttgcccgatggtaactaccttttcaaatccttcgtttttggagacagcttcatacagccgatgatcgatttcctgatatttaacgaaaatatctgaaatctcattgaaaatatcatagaagtcctctttgcgcatctccccttccaaaatgagaatgtctgaattggcacgttcgaaaatcccatcattcactgagcctattacaatcagtgtagtattgttggggcagttaaacctatccgtcacattttttgcagacaccatatagcaaatatcagaggaaaagttcatgcctctccgataaattcccactcccttcatttgcagtctgcgctgacttattttgttcctgcgtagtatatgagatggataatgggccaactcatccgcaacgagttccagacaaagattcaaaacggcagcacctccttaaaccaaattcggaaaaaagcctagctttctaactctgtaataattatactcttttcacaattgtatttcaaatgatagcacaaatgtgcaatgtgcaggctgcacattttttgtctgattcgagagacattatgtctccctgccgcacatatccactgaataatattgtcgataaagttggaaagcctgcccattttataaaaaaatctatagccagtatgaatatttcttgtttttagataaagacgtatactatccctatcaaaaaattgcgaggagggatatatatgtcaaactctattcccaaaacaaagcatcgtttttcgccctatttctatcttctaattgttattctgcaatatttgactgccggcttttgccagtataagctgcagcccgtcctgacctacttgatgagagggatgtcaattacagagacagaggcaggcctgctgatctcggcgctcagtattctcagcgtattcctggctgttcctttcggcgtcctgatgggcaggattgggccgagaaagaccggttttattgctacaggaatggtcattctgggctcatttgccggaacattttttacaactaacttctatggacttttcgcctcccagctgattgtcggagttggtatctgcggcgccggtattcttggcccctatatcatcgcctgcctgtttaagccggagcttcggggccgcgccaacgggtggtacattactgccggaaccattgcacagctggttatgtttaacctggtcccgcgtatcacaacagccgataatgtaaccccagcctggtggtttaccacactctacggcgttgtcatactgattctctgggcaatcttcattactgatgaggttgcacccccagcgtccaaactgcagcctgccgatacaggctccgcaggaaaaggttcttctctgcttgctgcactgaaagatcccaaggttcttcagctttccatcggcggctttgcttttatgatgagtactatggcggttatgaattttgctcccgcctatctgacgctgggacgcggctatgatccggtaaccgcttctaccctggtcagcggctctgccgtcgtaggcgctatctccacagcactgggcggtaccctgtcggatctgttgaaaaccagaaagtggatttttctaatcgcccttctctggatggcagtctcccgggtactgatcgtaatacttcctgacggcatacttctgaatctgacgctttggggacaaggcattcctgctgtatgtatgggtctgatctacaccgttgccggtgaaacgtttgagccccgcatagcaagcgttggtatttccgctgtcaatatgtttataggtctgggcggtctggtggcggcgaccctcttcggcgtactggtacaaagcgcaggctataccaccacattcattgttttcgctgttattaccttgggcggactggtcggtgtatgcaccatcaagggcgtgaaataaaaaataagtttcagaattgaaaggaggatttcacaatgtcaatgactttaaaagaaaatgcattagccatttacaatcgtcagcagccggatttttacggtgatcttatgaatgctgtcgaattgattggcgacccggttctcatgggggatatggcaccgcaggatggcctggagcatgcagattcctggggcacagtttatgtctataagccgggagctcctggccctcatccccatgtgactccggaaaatgccgtgattaaggatattgaaaactgggaagcccagttaaaggttccttctctggatcaatatgactggtccatggccaagtcacaggcagccgcagtggacagaaatgaaaagttcgtaggattcttttgtgcaggcggcctgtttgaacgctcccatcacctaatgggaatggaaaatgcgctggtaaactacctggaataccctgaggaaatggcggcgcttctccgtgtggttgcggattacaagatcaaactgattcgactggccgccaaacactttcaccccgatatcattttctatcacgatgactggggatccaaacagaatgtttttcttccgcccggtgtatggcgcaagattatcaagcctttacagaaagaaattgctgatacgatccacgaatgcggcatgatttatatgcatcatgcggattgcatttgcgaacctattgtaaccgatatggtggaaattggtgtggatatctggcagggcgtcatcgcacagaatgatattgttaagattcagcgtgtcactgaagggaagctggccatggttggcggcatcgacgggcctaaggtggatatcgccaatataaccgaagaggcaatccgttccgaggttcggcgtgccattgacacctattgtcccggcggcagattctatccttccatccccaacggaatctgtttccttgaatggaacaacagcatcgtgatggatgaactggcctcctacggacgccagtatgccttggagcatccaatctaagtccgataatagctcaaagaaagagaaactccatccggaacaaactgccaaacgcaggttccgggcggagttttttccttgatagttatataagcacggatttcttctattccctggcccagtcaaaggagcatctcactgccttcttccatccttttaaaaggccggaccttttttcctcctccatgtcaggttcaaatgcacgttccaggtcccaatacttccgaatctcctctctgtccttccaaaatcccactgcaatcccggcaagataagctgcacccagagcagttgtctcaatacactgcggacgttctacccgggcattcagaatatctgactgaaactgcattaagaaattgttggcacaggcgcccccgtctacttttagactattcagcggcacacccgcgtcctgttccattgcttttatcacatcatatacctgataagccagcgactccacagttgcccttatcaaatgcgcttttccggttcctctggtaattccaactaccacacccctggcatactgatcccagtagggtgcacccagccccgtaaatgccggaaccacatagatatcgttgctgtcctccacagacagacagtacttttccgattccccggcgttttttagcatctcaagatcatcccgcagccattgaatggccgctcccgccacaaacacactgccctccagtgcatattccaccttatctgagaagcttgcagctatggtagtcaggagtccgtttctggatcgtacggcctgctcccctgtgttcatcagaaggaagcatccggtaccgtacgtatttttcacgtctcctttttccagacagcactgaccgaataatgcagcctgttgatctcccgccgcacctgcgatgggaatccccccctgcagcacactctcatcggtatagccgtagatacagctggagggctttacctggggaagcatactctccggaatatccagacggtcaaggatttccttatcccagaccagcttatgaatgtcgaagagcatagttcttgaggcgttggtatagtcggtaacatgtactgctccctgggtgagcttccagatcagccaggtatctactgttccgaacaaaagctcacctttttgggcacgttctctcgccccttccacgtgatccaggatccacttcaccttactccctgaaaaataagcatcgggaatcaagcctgttttctccagaatcaggcggtcaaatccatctgcctttaattcttctataatatccgcggttctcctgcactgccatacaatggcaggatacactggttctcccgttgccttgtcccatacaatggttgtctccctctggtttgtaatgcctatggctccaatctcccgggaggcaacgccgatacggctcatagcctccgtggcaacactaatctgggaagaccatatttccatgggatcatgctctacccagcccggtttaggaaaatactgggtaaactccttttgcgccatgctgcatatcttaccttcccgattgaacaaaatgcacctggagctggttgtcccctgatccagtgccataatatatttcttcatagaagtcctctcttacccgatcgtattcgtaattgttccaatcccctctatgccgcattccaccacatctcctttgcgcagaaacttcggggggacaaatcccatccccaccccggcaggcgttcccatagagataatcgttcctgcctgcagcagcatcccggatgacagttcctcaatgacatgagggatgtcaaagataagaagatctgtagtactgttctgccgcagttctccgttcaccctgcttttaattccgaagatcggaggattgggtgtctcattagcagtcttgataaatggtcccataggagtaaaaccgtccaggctttttccaaaataccactgctggtgtcttgtctggatattccgcgcgctgatgtcgttgataattgtatatccaaacacatagtcaaatgcatcttcttttgaaacattcttagcattttttccaataatcacggccagctcggcctcatagtccaagctgtccaccagtccgggataggagggaacgatgcctccgtctggcacagcctcatttacccttttagaaaaatacacggaatatggcgctttgccgccgaatgcctcattcttatatctggttgactcaattgcgtgttccatataattcattcccagacagataatgtcctgctttggacgggggatgggagcacagtgttccacctcatcataattaaggtattcgtggttcccggtcccggcttcctgctccagcatcagaagctcctgccgggtaatatggtcaatcaaatcgttcatgtcttggaaccgcagcccaaactgttccagaggataaaatcttctcggctccagcttgcacattactcccagacgttccttgtcatctttgttcagcttgtaggttaataatttcataactcgttccccctcctgttttgtacataattgatatgatgaaattagccctatatttggatatattttaccataataaagttaaaaaaactataccctattgttcagtgggagagaggataaaggttcctatcctaaattccaatagaaattttttcaaaaatgcccttgacttttttaccgaatcatagtattatatacaagtcgctgaacgaaacagtgataaaaaacttcatttgcgggtgtagttcaatggtagaacactagccttccaagctagatacgtgggttcgattcccatcacccgctttcatcgaaagatgtatatgcgcgagtggctcagttggtggagcgcgaccttgccaaggtcgaggccgcgggttcgagtcccgtctcgcgctttttttgatcctgtgtaaataaaacagttcatttataaagccgcctcattttattcttggggcggcctttttgctgcatccggaaactctcccgcttctctctgcagctgtgtgagctgtctttttatttctttaaaatacatatcctccggattaatctgaagcacatagttcacctttcccagaagtcctgtcagatatgcttcttttggtttattgcttgaaacccggaccggatccggaccgtatttcagacagtagtggcactcctgccgtagtcttcttctgtagtctctgtctgcctgaggcttttcatttactacgatccctgtcaccatctgtctggttccggattcaagtacttttgtttttctggtattgagttcaaatcccaaaaccctcaggtaactctccaccttattctttacttcccggctgtcaaaggagccggaaaatgtcatatcgtcgcagtacctggtatatgttatcttgcgtatgctacaccagtttcccaaagattcgtcaaagcttttcagtaccagattggatactgcaccggatgtaggcgctccctggggcagatagtctctgtaacagcagaggtgtgtgagaagggttcccacgcttcccggaaacagcagacctccaaacacgttctgccgaacctgaaaaaaagtaatgtttccaaaaaagtccctcatatccaacttcagtattttttcttttccagtatggggaactgcgttggagaggatactttttccccttccataggccgtcgcatatgaagatacaggcagatcatccaagacatttctgagcagatttttctgaaccttttttaagaaggcatccggtatctggagggtcctttgcctgccgctttttcctgtgatttttttcaggtgatagtgttcctccgcatggttgctcagggaataaagacaggccagctgtttctccctgctccagttaacatcgcccaatagtctaaaatccagcagcatatctctgcactgttcccctgtacaatatttccagatatctgtattccccatatcctgcctccggctgtattctctgccttttatcctttttaacaaagacagcggcagcacaataaggagataccgaaagttgcggaaaggtaccaggccgaaggccaaagcacacgaagtgtgccgaagtaccttgcaagcagctttcggggtgcagtgcactgcacctgatactgtttgattaattccggggaggcgactcgccatccggccaaaggtaactttggattggctgcagccgctgtcatgtcaaggtttatagtagcatagaatggcgtgcagatccagtgcttccgtttatattacctgcagcttcgcttccatgcctcccctacggccctggccactgcaggcgcaacccttgggtcaaaggcatttggaataatataatctgccttcaattcctcctcagacaccagaccggctatagcataagccgccgcaagcttcatctcatcgttgatatccttcgctcttacatccaaggcgccccggaagatgccggggaaagcaagcacattgttaatctgattgggaaaatcgctccgtccggttcccacaacagctgcgccggcttccagcgcaagatccggcataatctccggtgtaggattggccattgggaaaagaatgggatcctttgccatggacgccaccatttctttggtcacagtacccggtgcggatactccgataaatacatccgctcccttaagcatatcctgaaggttaccttttctcttctcttgattggtaatcagagccatctcttccttaaccgggttttgcccttcccggccttcataaattgccccgtttcggtcacacattacaacatgcttcagtccaagacttaccagcagtttaatgatggcgatccccgccgcaccggcccctgaagtaaccacctttatatcctccagcctgcggccggtgagttttaatgcattcaatagcgctgcgacggtcacaactgcggtaccatgctgatcatcatggaagaccggaatatcacagcactctttcagccgcctttcaatttcaaagcatctgggggcagagatgtcctccagattcacgcccccgaagcttcccgccagaaggcgcacagtatttacaatatcatctacatctttactgcggatacataatggaaaagcatctacattgccaaagcttttaaataagacacatttcccctccataaccggcatccctgcctcagggcctatatcgcccagacccagtactgcacttccatctgtcacaacagctaccatattgtgacgtctggtatatttataagaaagctctgcattctcagcgatcttcaaacagggctctgccactcctggtgtataagccacggagagcgcctctgcggaatctacctttgctctgctgataacttcaatttttccctgccatttttcatgttcctgtaatgcaaattcttttttgtccatgtttttgctccttttagctggccgccttcttgggggcctctaatgcctttgtaagaaattcccgcagcgtttccgctgaatcttccatcttcttcttttctgcctcgtccataggaatatccagtaccctctgaattccttttccattaatcacacagggaaggctgaatgcaattccccggtaggaggggaactcctctcccagtacatgggataccggaagcaccgtattcccgtctgacaggattgcctcagcgattctggatgtcatcatggcgattccgtaaaaggttgcacctttaagctgaatcacctccgcacccgaatcccgggccctctctccaagggcttcatggttcagttcccccttacagcccatggcttttctaaactgatctacaggttccccggcaatggtagcgctgctccataccggcacctggctgtctccgtgttctcccagaatatatgcgtttacatcacagacatccgcccccagctcttcgctgatcagataacggaagcgtgcggtatccagcgttgtgcctgtaccgatcacccgttctgacgggaggccggattcctggcatgcaacataagtagaaatatctaccggattcgaaactacgattaaaataggattctcagcatatttcatgatattccgggtaatgctcctgacaattgccacattagactttgccaggtccagcctggtctgccccggttttcttgccataccggctgtgattacaataattgccgcgtcctcacattcctcatatccgccttttctgaccttgatctgacggaaaaaggctgtggcatgggcgatatccagggcactgccctttgccctgtcctcattgagatccaccaggacgatgtcactggcctgtttgcgcagcataagagtatatgcaatcgcttcccctacattccctgcaccaaccacaacaatcttatttttattcttattttttcccatctctgcattctcctattttcataacaacaagttaacactgcaatgcatgataaatttataacaaaaggcctttttctgtattatatctcatttgcatttcctatggcgttaaggtgccgttaatattgtcattgtgttgtttataaggtacaatagttagaactatatgattactatattcggagaggtagctatggaacgtgatttaacggtaggaaatgaaaaaaaggttatgctgcagttcgcactccccatgatcgtgggcaacctgctgcagcaattttataatattgcggattcttttattgtgggccgttttattggtccggaagcactggcagccgtgggcacctcttttgcactcatgacattcctgacctcggcaattataggtctctgcatgggaagcagcgtcgtcttttctatgttttacggtgccaaagacgaaaagagaatgggggacagcttttttgtggcttttctcctgattgccctgtttaccgtggtaattaaccttctcacttatgtttttacagatggaatcatacacgttcttcggattgacagctccatacgttccatgacaaaagaatatctggtcgtcattttcggcggtatctgcttcatctttctatacaattttttcgcggccattttaagaagtatggggaattccacggtacctgttatctgtatcggggtatccgcagttttgaacattggcctggatcttttgtttgtagtaggcttccattggggcattgcgggagccgcctgggcaacgatcaccgcacagggagtatccgcccttttaatcatggtttatacactgacaaaggtgcctcaggccaggatctcaagggataatatgcatttcgaccgcgcccttgccaaagagattgcaggctgctccgctctcaccagcgtccagcagtccattatgaatctgggaatcctcatggtgcagggtctggtaaacagcttcggggtatctgtcatggctgcctttgccgcaggagtaaagattgacgcctttgcctatatgccccttcaggacttcgggaatgcattctccacttacatagcacagaataagggagccggcaaaacagaacgaatccacaggggaatccggtccgccatccagttatccactattttcagcctcctgatttcctttattatctttttctttgccagacccctgctcacgatcttcattgccccggatcagacagagattttaaggattgggtccaattatctcagaatcgagggagtcttttatctgggtataggacttttgtttcttctgtatggtctttacaggggactgggacacccgggtatgtccgtggtcctaaccgtgatctctctgggcaccagggtactcctggcatatcttttggctcctgtgccggcaatcgggctgaccggaatctggagtgccatccccatcggctggctgctggcggatcttaccggactgatctactatgcgaagaaaaagaataccctgtaatggtcctgtattggattttcagcttgccactttaacgtctgtctgctataatgatatagcttaaaagcatttgctttgactatgggagtagaaaggtaactggtgtgcctcctggtcttcaaaaccagtgttgggcgttaacagcgtcctgggtgggttcgattcccacatgctctcgccagaaaataaccacatttatatacaaaggaagcgggttccctgtgaacccgctttttgattactggttaatccctgtattccgctcatattctttaatcatgtccagattagcccgctctgtctggttgagcatcccctcactgaactcttccgccggcactgatggagtataccaggatttcccgctgaaatattcctgcagatcctgcgcactgaaaatatagccatgacgggcatagatctcatttctggcaatacgtatttcctctgccgtcagtccttccagatccagcttccggtaatagcggctgtcactccccggaaggatatactccccgtcactgctcttgggagggtcctctgtctttaccggttccggcgccgtactgccaaagggcgctctgctgtagactgcatccattgtaccgtctgaagaagtataataaatgtaattcctgtccacacccacggctctgccggtgacagatccaatctcttttgtctgtcctccggcataattatagtagtatacatgatacaccttgggaggataccaggttccgttggcatattccccggaatacgcggaataatagaatccctccttgtcgtttccaataagctcggtactcttttccccgtgattgtctgtcctttcaacagttcctgcggccagatccagcaccttctggaagctctctgtatcattatagcagtcaaagacagcataaccattctccacacttttcagccatcccatctctccgtaggtgtccgttaaaagcaccctgctttcactgctccccggttctttctctgtgagttcaaagatactctccgtgtcataccccggttcattgcagtgtacataataaagcttgccctcccagacaaacgggccgcctgctgcctgctgctccaggataaccgcattccctgtagcaggatctccctcgtagagaggggatgcgctcacatccgtcctgcctcccagatagtacagcctgtccccacatgtgagtatactgaaatccccccacatgtcaggaaaggccagctccctgacggtaccttcacgcaaatccttctctacgattatatggtcatccatatcatttttccctgcggccttaacatataacttgctgcctatcagtccgactggctccatccccatataattcccaagaatcacggactgcgttctctcttcaaaatcatagtattcaagagaactgccggtctgctccctggcataatacagaccctcctccgtcatcatcagcctgttcccaacggttccctgtgtgctccagacctcctgatcctcctcgtagagaatcagctccatatctcccagagcagctgtgcggttccccctttgtaacacaaaggttcccagtgtaaccgcaggttctttctctttggcagtctccttcgcgttctctgtctccttctcctctgctgcctgtttttctgcctgtatcttttgggctgttttgggttcttcagccggcccggggcctttttccttttttccgcccaggattacgcaaaacaaaatgaccagaaaaactgctgcgccggcaacgataccaactgctgctattttcttcttctccggcttccgcccacctccggcctccagggaagctccgcagtaactgcagaaggccgaaccctccggcagttcttttccgcaatgctgacaatacatcgttatcccccttttccataaacataacgggccggaccgcaggctaaaagtatgcagtccgaccccgttatctacttttctataatgcttttattctctcaacagcttccaccgtattttcatagtttccaaatgcagtaagacggaagtatccctctccgcttggaccaaagccagagcctggcgtgcccactacgttggccttttccagaagatgatcaaagaattcccatgatgtcattccatccggcgtcttcagccagatatagggagcgttaacgcctccggacacggtgtagcctgcggatttcaggccttcatagatcactttggcattattcatataataggcaacttgttcctttaactgggctttaccctccggtgagtataccgcttctccggcgcgctgtacaatatagggagccccgttgtacttagtgccatgacgtcttgcccacagagagtgtagtgccacatccccgcacttcaaatctttggggattacggtgaatcccagacggactcctgtaaatccggcattcttagagaagcttctaagctcgatggcgcaggttcttgccccttcacattcatagatagagtggggaacatccggctctgaaatgtatgcctcataagcggcatcataaataatcacagccccaactttattggcataatctacccactcctgaagctgtgcttttgttatcgtagatcccgtgggattattggggtagcagagatagataagatccggcgtctctcccggcaattggggggcaaaatcgttctcagccgtacatggcatgtagattacatcgctccacgtctccgcctttggatcataggttcctgttctccctgccattacgttggagtcaacataaaccggatacacaggatcacagactgcaattttattatccagcgcaaaaatttcctgtatattgctggagtcgcattttgccccgtcagacacgaagatttcatccgcaccaatgtcacagcccctgtctgcatagtcattcctggcaattgcacttctcaggaactcatatcccaggtccggcgcatatccgtgaaacgtctctgcatgtgccatatcttccactgcgtcatgcagtttgccgataatagccggagccagaggctgggtaacatctccaattcccagacggataatctttttatccggattggcctctgtgaaagcattcacttttttggcaatggtagaaaacaaataactgcccggcagtttcaaataattatcattaatcttaaacatatatttcctcctaggtaactgtttctgttcctattctaatataaactccttcttctggcaatagggcagctacagtaaaatttctccttcaaataccacggccgcaggccccgtcatatacaccagatcttcttttctgtcccagtatatcctgagatctccccccagaagcttcacagtaacctcctcgtccgtataaccgtttactatagaggcaacagccactgcgcaggctccggttccacatgccagcgtctcccctgcgccccgctcccagacccgcatctcgacggagcttcgatccaggacatgcacaaactctgtattaatccgatccggaaatgcagggtggtgctcaaatgcagggccgattctttcaatctccaggttcttaatgtcgtccatgtagactacagcatgaggatttcccatagaaacaccggtaatataatactccctgccatccacgtcaatgggctgtcgtatcacctgttcccggtcactgtgtatgggaatctgagacgccttaaattcaggccttcccatatttactttcaccaggctaacttttccattttctatggtcagatccagatatttcaccccgctctttgtatcaatgctgatgtttgtcttatgggtaagtccatagtcatagacatacttggccacacagcggatcccgttgccgcacatagctccctgggaaccgtctgcattatacatatccatctcaaaatctgcattctttgaaggttttattaatatcaggccgtcagagccaatgccaaagtgcctgtcactgacaagccttgccacccttcccggatcctctaccttttcctccaggcaatttacatacacatagtcattcccgatgccatgcatctttgtgaatttcatatcggtttcctccattaattacttcatcatgctcagcaccatctgtgccatctctgccatatttgtgccgctgtccatactgcacttctggatataacggtgtgcctcctcctctgtcatatggttccgctctatcagaagctttttggcttcgtctattaccgcctgttcctccggacgccttgccttaggcatggaggggcgtcttttcctccacctgctgatgttcctctccatcatatccacggtttccagcagctcatgcaccttcagaggcatcgccactgagacaatcccattgggatcccattgacttaaaacccggggggaagccaccagcagcatctcaaaatgcctgggcagacattctgccagctctgtataaagcatatccgcataacggtatccgcataccacaattccatcattcagggtattggcatgattcagggcctgtgcacctgttgtgcacaccgccgtcacctcatatccatggcgtacgagcagattccttatattttttccgtcttcctgttttggaaaaagtacaatcatattgctcattcttacgcctcctgtctattctaccattaaatagtaccaattgcgataggaagcatcagaatttgctgagataatgatctacctcccagtcagttacctgtatggtgtaatcctgccactctgcttttttcgcctgaatgtagcgtttcgccagatgttctccaaggaccccccggatgaattcatccttttccagctccctgacggcctctctcagattggaggggagagaatcgatcccctcctcttccttctcgtccacagacatacggaatatattcttatccacgcttctgggtggcttcatcttattcttaattccatccaatcctgctgccagacagactgccagtgcaagatacggatttgccgtgggatccgggcttctcagttctattcttgtctcctcccccctcgctgcaggaatacggataagcgggcttctgtttgtagccgaccaggcgatataaaccggagcttcatagcccggcaccagccttttgtaggagttcaccaggggattggtgatagctgtcatccctttcatatgtcggataattcccccaataaagtaataggcgtcctcactcaagcccattgcgtcagccggatccgcaaatgcattctttcccgctttagacagagacatatttatatgcattccggacccattcattccatacttcggcttgggcataaatgtggcatggagcccatggcgtttggcaattgtttttacagccagtttaaaggtcatgatattatctgctgtggagagggcttcgtcataccggaaatcaatctcatgctgtgccggagctacctcatggtgggatgcctctatctcaaagcccatctcttccagcgtcagaaccatatcccgtctggcattctcacccagatccaatggagccatatcaaaatagccggccttttcgtggctgagtgtggtgggcagtccgtcatcgtctgagtgatacaggaagaattcgcactcaggtccggcattaaacgtataccccattgacgccgcctcctttaacgtcctcttgagaatataccggggatctccctcaaaaggggttccgtcagggcggtaaatatcacagatcagccgggctactttgccctgctggggcctccagggaaaaatttccagagtatccagatccggatacagatacatatccgattcctcaatgcgcacaaatccatcgatggaagatccgtcaaacatgcattgattgtccagggcttttttcagctgactggaggtaattgctacatttttaaacatcccgaacatatctgtaaactggagacggataaactccacatcctcttgctccaccagttccatgatttccttttttgtatatttcgccatcttatacactcctctctgtttcattgccacagggcctatctcttttcatacagaaaaaaggcactctttccccagaaagaacgcccttgttctgtttcataatagcagtcgatccatactttgtcaatcctcaactgcgtcttctgtctcccggagtatggtttccatacttacatccaggatcttagaaatcttccatatcttctcaactgttggattgcactttcccttctccaggctgcagatatagtttctggtaaccccgagcctgtttcccagctcttcctgggtaagcccctggtcctgcctgcagtttctcagattggaccctatcctgctccaaatctctgtctgctttccttccatagtattccccctcttttgtctcttttcttctgcgcatacagccgctgaagaggtccttataaaataatacggaatactacctcacgaaattacacctgaatgtcaaatattgtcgttttttcatatttccggaaaaggctgaagacttcgtttcagaatcccctttatgtacgcaatcagaatcccataatttgtcatgggaaccttctgatccctggcacaggacatgcggtacttcatttctctttcattcagcatgcatcctccgcagtggacaatcagtctgtactctcccagttcctcctgaaactctgtccccgacgtaaactcaaattccagactctttcccgtatacttccggatccagccagggatcttaacagtgccgatatcattgcactgcctgtggtgggtacacccctcactgatcagtatcttatccccgtccctcagcgtctccaggcattttgccccctccacattgtccttaaggctgcccttataccgggcaaacaggatggagaatgaggttaacagaatatcctcaggggtatcctcagacacccggctaaacacctgactgtccgtaatgacaagagccggcttctttcccagctggttcagggtatttttcaattcattttcctttactacaatagaaactgcatcagattccagaatatcacggatcgtctgctgctggggcaggatcagccgccccttgggagccgccttgtctataggcacaacaagaacaataaagtccgaaggctttatgagatcccccacaatccttctctctttgtcctccttgctcccctgtctggcaatcatctccttcaattcatggatattgcttccttctttggcactgacccagatctcattttctttgaccggggcaggttcctcacactggtccgccttattataggccacaataaaggggattcccttttttctaaacctctcaatcagagcctcatcttcccttgtctttccaaggcatccgtccaccaccaggactgccacgtcggtcttattcagcacctgatagctccgctttacgcgaagcgctcccaggtcaccttcgtcatcaatccccggagtgtctattaccataaccggtcccatgggaaggagctccatggttttatatacagggtctgtagtggttccccttacctgagagacgattgccagattctgccctgtcactgcattgattacactagattttcctgcatttctccgcccgaagaatccgatgtggatccgttcggaagcaggggtttgattcatgcccataggtatccctccaaattctgaatcatctttgcttttttacattataggcacaatacagtcagaatgcaatttctttttatctgcggtcttcctcaatgagatacttcttttttctcagctcttcttctatcatatccagtgtctccctgctgtctgcctctatggtatgccagtgtttgccggaagtaaggtttttcagcggacttgacttcccgccggagatgccggatacgaactcctgtacgtttctccgggagcttaccccaatgggcgccctcagggaaccatatacctcgtgtctgataaagacatcaattacctttcctcccagatctacaatggtattcagttcatcttcaatctcctcatccgcatggcagacctccaccaccctggtaacggacacaggcatatgaatcagatatcctttcgtagttgagaagatatcataattggcagcccgaaggagggcaatgtcctgtactaccacctgccggctcacatggaaccttttcgccagagcggtaccggagatcggcacatccgcttcctgtattgcctgcaatatttcactgcgtctttcttccccagtcatagaaacttcctttcttttttatgtttctatacgttggctttgctgcctgctgtttataatgcatgaagatttttgagagaaacgtccaggatgggagcagagtgggtcaaagctccgctggatacatagtctacccctatatctgttatctttttaatgttttccctggtaacattgccggaacattctgtctctgctctccctgctgccatctccacagcctttttcatcatctcgggaggcatattatccagcatgataatatccgcccccgcatccagcgcctcctgcatcatttccaggttttcaacctctatctctatcttgcggacaaacggcgcatattcctttgccatctgtacggctctggcaacgcctcccgcggccccgatatgattgtctttgatgagaacgccgtccgagagattatatcggtggttatatcctcctcctatttttaccgcgtatttttcaaaaatacgcatattaggtgttgtctttctggtatccagcagcttcgtcccggtcccttttaaaagctcagccacactccttgtataggtggcgatcccgctcatccgctgcaggaaattaagggcggtcctctccccggacagaatggcacggatgtccccctccacaacagccaggagatctttatcctttacctcatctccgtctttacagtacatagtcactttgacagactcgtccaaaagctggaatacccgcttaaatatatccattcctgcaatcacaccgtcttgtttgcatatgagctgcgcagttccctgctttgcctccctcataactgcattggtggttacgtcttcgctggatatgtcctctgccagtgcctggagcagcaggttatccacatttagcttggttgtgattggattcattctcttctacctctctgttcttcttttctatctcttccagaatcgcctttttcaggcctccgaaataatgttcctcattctcataatcctttttctgtatcccgtacctacgctccagctctgtccagtcccggcatccctgtacctgagaattttcttcggttcccgatagaattgcacaggctgcccgtttggcaaagacaaggctttccagcagggaattgctggccagccggttggcgccatggaccccgttgcagctggtctcgccggctgcatagagatgcttcatagaagtacggctggacaggtccacatccacgcctcccatgaaataatgctgagaaggcacaaccggaatccattcttttgtcacctcatagccctcttccctgcacttctggcagatattggggaacctcttccacacatcgtgcctggttattgtcatcatggacagccacacatgctgagttctgtcctttttcatctgtttcagaatctctttggtgagaagatcccgcggcagcagctcattaacaaaccgctcaccctttttgttatagagaaccgcgccttccccccttacagattcagagatcaggaaccgacgtccttttttttgagaatatagggttgtagggtgtatctgtacataattcacatgctccagatctactcccctgcgaagagcgatccccagggcatcaccggtgagatggggatagtttgtggaattgtcatagattcccccgatacctcccgtagcccacagtacatcccgggccataacaggacgaaggtctcccgtgctggttttcatcaggattccctcacagcggttctctctggcaagaatatccatcatagtcgttctggtgagtactgtgatatttttcctttttcttacctggtttaaaagatgggaggtaatctctttcccggttatatcatcgtgataaaggatacggttggtagaatgagcaccttctcttgtatagagaaggcttccgtccttctgtgcaaattcaacgccatattccatcagttcccggatcacatctctggaggaacgaatcataacctccacagattcccggcggttctcataatgccctgcccggagggtatcctccataaagctttcgtagtcctcctcctctttttggacacagatccccccctgcgccagaaaggaatcactctcttctaattcccctttggttatcatcaatatacttttgtcatccggcaggtgcagcgccgcaaaacagcctgccaccccagtccccactatgatgacatcatacttctcttccatacggtctcctaactatttggccagttccagcatacggatcaacggcgcgtgtgctttcctcccaaattcctcctcaagttctatccggggctgtccgctttccagtgctccgataatcttttcaagtgttatcttcttcatattcggacatatctgcgtgttgccggcagcatagaatctcttgttcgggttccgtttctgaagctcatacatcacgcccatctccgtccctatgatgaattcctccccatcgctctcagtggcatactgtattatccctgacgtacttcccacataatctgccagttctgtgatctcttctctgcattccggatgcaccaggatctttgccttaggccttgacgccttaatcctttccagatcttctctccggatggcagtatgtacatggcaatagccgtcgttaaatataaaatttttttccggaagctgacctgcaatataccggccaagattctcatcgggaataaaatagatatttttatttggcagtgccctcacgattttcagggcattggaagacgtcacacagacgtccgcatgcgttttcagttccgctgtagaattcacatagcataccaccgccaaatcctggtatttctcacgcatctccccgatcttttctactgtagccatatgagccatcgggcagtccgcatgggcatccggaagcagtacaaccttatccggattcaggatcttcgcgctctcccccataaaggatacgccgcacagtacgattgttttctcttttacttttgtggcaatctcacttagatagtaggagtctccaatatagtcagccacctcctgtacctcgtctctcacgtaatagtgcgccaatataacagcatctttctcttttttcagccgctcaacagcagctatcttctcattcatacttatcctcccatatattatcatattggcgatagtatatcacatgtttttacagctgacaagacagctgtatttccaatatttaaaaatgtaataaaaactcaataaaatggtcccgctctctgcaataggcactaccagccagatcccctgcataccccaaaagcccggcagcagaaatacaagtaccgcgttaaggacaatcccccgcagcagagcaatggagagggattcccgcgcccggtcaacggaagccaggactgctgctgccacaatattgagtcccattgtcagaaaggcggtaaaataaaccggcattcctttcgccgcaatcccttcgaaagctgcatcccctcccccattaaaaattcctatcagctcatgggtgaaaaggattcccggcagacagcagaggacgcccagaatcccggccagaatcaatgcacgcctaacataggaaaagactgctttgatatccccgctcccgtagccgcggctgaccaaaggctggatcccctgggcaatcccattaaatatggacataactataatggccagatttgcaatcaccccgtaggcggcaactcctacacttcctgtcagattcagaatcacataattaaataaaagtattacaatcccggaggatatctctgtcacaaaggaagcgccgcccagggacatcagcttcaccagagcttttccctggaaccggcacttctccaggcggaattgattcttacccttccagatatgggcagatgccaccagcatgctgaacaggggagccagccctgttgcaaatgctgctccgaacatcccccatccgaaaccaaagataaaaagagtatccaatagtatgttgctgaaactgcctgtcagcatcgccgccatagccagcctgggatttctgtcatttctcacaaagcacaccagaacattgttaaacaggaaggggacagagaaagccagaagcgtcctcatataagggatcaggcattccattaccttcccttctgcccctaaaagtatccccagaggcttcgtaaaagctacgccggataccgtaaaaagtatccccaggataagcgctgtcctgcaggctctggtaaaggcaatattggctttttggccctgccccatcccctgctccatggaatacaaggtggcgcctcccatgcccagcatcagacccacgccgtttaccagtgaatacacaggtattacaaggttaagggctgccaggccgtcgcttcccactccgtttgcaatacataaagtatccacaaagacaaagcatgacagacctatcatgcttaaaatattaaaggacacatatttccaaaaggctcccggtccccattctgctttttgtttcatcattctctccctttcttattccggattatgcgtggccgccctgccaacagaaaaagcaccagtcccggattccctctggcctgctggaatccgtgtctgatgctcctatacctgcatctatccggcgatagatacgggcagcataatcttttcatttagtctcaggaatgtattatagcaaatttactgtattctggcaataatttcgtttgcttttttataaacttcctccgcatctgtgccgatattaaaacatccgtcctcatataaaatccgtccgtttaccatagtcagcttaatattctgtttgcttccgctgtataccaggtttttggtgatgcagttgagaggctgcatattgggctgatgaagatccacaagaattaaatctgccagctttccttcctccagtgtgtcacactccccaagccccatggccctggcgcctccaacagtagccatatacaatacctggttggcatccaccaccgacgcatccctctcccgtatctttgccagacctgtggtgagaaacatctcccggaacatgtccaggcagttgttgctggccggaccgtctgttcctatggccaaagggatccccatatccagcattctctttaccgggggaatcccgctggccagcttcacgttggatcctggattggttataacatacaacccccgctttttaaagattcttaaatcttcttctgtcatatgaacacaatggtaccctcctcccccatagtcaaagagccccagactgtccaggtattgggtgggagtcatgtggtttctatcaagacactgctgtacctccgacaggctttcagaattgtgggtatacacaggcgccttatatttatgagagagttttgccagccctgccagaagcttttcggatgtagtatactctgcatgaaatcccagccggaaagaaatgagagaatggtaatgattatacatgtgataccactcttctatttcctccagagactggctgaagtcattcattcctcctgtcatgactgtacggaaaccacagtccacagatgcctcagcaatagtgtccggcgtcagatacatatcaaaattagccgtgatcccgctggtcaggtattccataatagccagctttgacaaatggtagatatcctctggtgttaatttggcctccatgggaaatacctgcttattcagccaatccagaagcggcatatcatctgcataggaacgcagaaacgtcatggcagaatgggtatgtgcatctttaaagccgggcataatgagatttccgtttccgtctatttcccggtcccattcttcctctctgtgtttctcctcccccacataagcgatccggtttccctttatctgtacttcgccccgggtaacctggaaatcgtcagccatggtcagaattcttacattataaaagcgtatcttcatcttgtctctccttttttctggaaaatcatccgcagactgtctgtataaggcggcctgcagatcccgtattctgtgactattcctgaaatcagtctgtgatccgttatgtcaaacgccggattgtagcatttcaccgaaaggggtgccattgactcccgataaaatttgtcctttatctcacggccgtctcgaatttctacgggtatgctgtcgccggacgggcattctaaatcaatggtagaggtcggacccagcacataaaagggtatcttataataggctgcgaggattgccacctggctggtacctatcttattagcggtgtccccattggccgccacccggtcacagcccacaaaacaagcctggacccagccgtttttcataaccgttcctgccatattatcacagatcagcgtcacatccacccccgcattctgcagttcatagcacgtcagcctggccccctgcagcaggggtcttgtctcatctgcaaatactctgaagttcatccctttctctcttcccaaaaggagaggtcccagagcggtaccatacctggaggttgccagaggacctgcattacagtgcgtcagaatcccatccccgtcccgaatgagactcaggccatattctgaaatagaccggcacatttccacgtcctctctctgaatcgccagggcttcctctctcagatgcctgcagatctcttccgtattttcctccctgtgcttcttaattaccgcttccatacggttcaggccccagcttagattaacagcagtagggcgggaagccatcagatacttcttgtatctgtcaaactccctgacgaattccggcttatccttcccccgcatctgcagagccaggcaatacataccgtatgcaccgcagatccctatggcaggcgcacctctgacctttaaaagatagatcgcatcgtatatgtcttcggcagtttccagccgcaggtaaaccttccggttagggagctgtgtctgatccaaaatgacaacagctttcccgtcatcgctcagccttacattttctataaaatccggcatactatcccccctgtctatatctacccttattttttcacatctgagtgaattatgcaacttttttaccatgaatttccgtcagatcccccatccatttttttacataactgcgcttgcaaaagtaataaacccgtagtaagattacttttagcacagccagaaatatctaagtttaacaaggagcaagcaatgaatacccccaaaacaagagattttctcttagataactataaagccctgcttatttttcttgtggtagtaggacactttatagaagagggatacgattccaacccctttttatacgagctgaaatggttcatcgtatcctttcatatgccagcctttatctttgtatccggatacttttccaagaagcaggcatctcttggaagactgattcaaaggcttatcattccttatctggtatatgaagtcatgtattaccttttatacacactgatcatacataaagagacaaagctatacctgttatatcctaaattttcactgtggtatcttatggcactgtttgtctggcggtttataacgccatatatccgcaggattcccgctgccatccatattccctttgccatcctggcaggccttttgatggggtgcagcagcatggatgacaacttcctgtctataccccggattgtggtattctaccccttcttcctggcaggaattcattttaacagggaatggctttcaaaatacagaagcaaaataacaaaagtcctggcgggtctgcttttgtgccttggatgtgtatacctgtatgcagatccaatacaccgtaatctatcccccaagatattctacggaagatataattatgaatatctggaattgtcagatatggacggaatgtgcatccgcctgctctgctatgggatatcatttgcccttacatatcttctcatgttcctgatcccggacagaaaaatcttgtgttcctgtctgggcaaccgtaccatgtctatctatttgtttcatggtttggtttactccagttttaagcaggccaccgatttattggagcatatctatacctggtgggaagttctggctctgtttggactctgtatcttcctggtgtggatattttccaggaagccgtttgtagactttaccaatgatgtggcaaagatagaattgccgaggggaccaaggcggcccaggaaaaggtataaaaaggggacgtgttcttcctagaaagtacacgtccccttttgcactcagggtgtcccttttcaagaccgccctgtccctttttgatttttagcaggttgctcctcctaccagatgaagttttgcatccaggatttcctgctttctttccataagcccattccccataagctgttcttccacgttctcaaagccaagcctttcaatggtggaagcaaaccgttccccggttttaccctgctcccgatacaggagaattactttttctattatttccattaattcttctttggaggtaaatacttttgacagcggctgtcccagagcaatccgtttgccccatctccctcccaggtagattttgtatccgactttgccgtcttcaatggcatcaaagttgcactttcctacacagaggccgcagtttgtacatttctcttcgtcgatttccagtaccccgtctacaaccttagctgcctggggaggacagactttctccaccggacattttttacagccgttgcagcaatcttcatcatagtttggaatcagctgacccacgattccaagatcgttcagatccggctttacgcagttgttaggacatccgcctacagctattttaaacttgtgcggcagttttactttttcatagcctttatagaacttctcatggatctcttctgaaattgcgtatgtatcaattaacccgtattggcaggtagtacccttgcaggatactaccggacgtactttggagccggttcctccggtttccagtccggcctttgcaatgtaggcccgaaactcttcaatcttatcaaatggaatcccctgtatttctaccgtcagccgggtggtatacaccacatttccatttccaaataattttgccgcctctcccagacagatctgctgctctgctgtgatctttccattttttgtgataattcttcctgaaaagttatctgtgcctttgttgcttaaaaaccccagaccttttactcttttttcctcttccgggctaattgttaatgttgccattctgtatttcctcctatttttacatttattctatattaatattaatacagcgacctctaaatagataccctttttaaaagaatttctcttaaaaatctgacccgttaaaaatagttcctccctcaagtgccttggtattagtatatccatagtatttcaggcggttctgaagcatatatgctctctttcctttggagcagaccagaagcagtttatcgtcttttccaaactgaggaagttctccgttcacactggaaagatcaacatagactgcgttctccagcgacggctgaatggaaacatcaatcacctgatatccgtcggctgctccctctctgtactgcaccggtgtaaaggtatcgaattcaccttccatcttgttaagaagaacatttacggtatgttcaaagggatgaatggcagttgaaaacggcggtgcataagcaaagtcaagatgctccaaatcatctactgctgcattcatgcttaatgccatcacagcaatatccaccatcttatccacggcgccggttcccaggcactggatgcccaagaactttctggacttcgcatctgccactaatttgacgatgaagctggaagcacccggataatagtgagctttgtcatccactactgccattacgctgaccggttggaatccggcttttgccgcgtctgtctcggacagtcctgtccgccctgcattcagccccggaagttttacaattcctgttccaagaacccccggataggcaaccttttctccggcaatgtttttagctgcgattcttccttcaatatttgcggaggaacccataggagaccaggcggccgcctttgtcagacggttgcagaccatggcacagtcacccagcgcatagatattctcatcgtttgtctgcagatactcattcaccttaatggtgcggtttggcatcatctcaattcctgtgtctgccagaaagcctgtgtttgcccggattcccagagacataacaatagcgtctgccttcatagccttgcggctggtctgtaccttttccaccttatctgtgcccacaatggcctccagctttgtattggtaaatgccataattccctcatctgccagatggtcctccacgtactctgtaatctccggatcaaatcccggcataatatgctctgccatatcaatgacagatacctttacccctttttccttcagattctctgccacctcaagcccgataaagccgcctccggctactaccgcgcgcttaatgcttcctccgtccactgcagcttttaaagcatccgcatcctccggtgtacgcataaaaaatacattctccaggtcaatcccctcaataggaggttttacgggggacgctcctgtggaaatcaccagtttatcatatgtatacacttttacttcaccggtgtccacatttaccccagtcacacacttcttatctctgtctaaaccagtcacttcaatccctgtcaggacttccgttcctgtaagctttgcaaagctatccggtgtatttgcaatcagcaaatccctgtcctggatgacatttcccacataataaggaaggccgcagcctgcataagagatctctttgctcattgttaaaatcgtaacctcagcacttctgtccaatcgttttaattttgccgcaacctttgtaccggctgctaccccgccaataattaatactttcacgaaaatacgcctcttttcttttattttgcagttccagtgattctgccgactgcattccggcttttttatctattcctatgataacacttgatttatcataggtaaactaatataatactatataaaacataggcattacctatatgttattgtattggataaggaggccatttatgacaatcagacatctgaaagtatttatagaagtggcagaaaaaggaaagatgagtgcagcggcagaggcgctttttatcactcagccctctgtcagccaggctatccgcgagctggaggagcactacaccacccttctgtttgagcgtctgtcgaaacggctgtatattacagaggcaggtaaactcctctacggatacgcaaaacaagtcgtctcccagtttgacctgatggaagataatatggcaccggacaatctgaaagaaaaactcaggatcggagccactctcaccattgggggcagtatcctgtcccctcttgtaaaagactttcgggaggagcatcctgaaataaatatttttgcctgtgtagataatacgcaggacattgaacagaaattactgaatatggagctggatgtggccattgtggaaggacaggtaaagcaccatgatctggtgtctattcctctcatcaaagaccgtctggttttggcctgcagcaatgagcacccctttgcaggcagggcctccgtatctatccatgaactggagggccaggaattcgttatgcgggagccgggaagcggcaccagagagcttttcgaaaaataccttgaaaaacacaagataaagatccatactgtctttgaggagcactctccggattccatccggaaagcggttttaattaacaactgtcttaccgtaatctcaccccgcctgctggagtcagagcttcgggaaaataaggtatacatatttgtcaatgcccgccaggactggaaccggtccttcagctttgtataccacaaagataaattcctgaccccatccatccggcatctgcaggagctggtgaccagttacggggaacacgaggttctggccgacattccggccggacgtctcacagtatctgcataaatcggaggttataaatgaataccattgatgtaaatgaacgctacaaaaaaatctgcggctattatggggccgccattatcctggcgggtatcctgacaggaatctataatataataaattctacatcctattacgtaatgctggccttctctttctgcgcctttgccttcataccttttgtatttaacaaggtatttcgccttcgcccgacctatattatacactttgctatctacgccttctctacccttgcttttggaatcggcatgattttaaacggctaccaccttgtacccggctatgataagtttgtacactttttatccggtatcgtttttacgcttatcgggtgctgtattttctacatctttaagccaagaaaaaagctggagagagaggatgcccctctcaccagcctgttttccctctgtttttctctggctgtagcctgcttctgggaaatttttgaatacgttattaactttattctacacaatgacccccagaatgtatttaccacaggggtaaatgataccatgcaggatatcatcgcctgccttctcggctcctttgccgttgcctttagtctctggcactatctggccaggggcagggagaatttcttctcaaggatcctgcagagcttctgcgatataaatttaactgccaagtaagaaaggaggatgattatgggtgaactatctaaacttcccaacatcggcccagccgtggaggcacagctggaagaagtaggcattaccacaccggagcagctaagagaaaccggcagccggcaggcatggctgaagattaaggccattgatgattctgcctgtatccaaagactttacgccctggaaggtgcagtcctgggtatcaaaaaaagccagcttccattggacacaaaaacagagttaaaagaattctaccggcaattcaagtgatctgatatctgctgtagcgtcggcaccctttcagcacacagaatacggttacaacagccacaattccgtattcactccaccggaacacagccgatgcgctggacagttccgccataggcataaaaagtgtcagggaaccaatgattccccggagaaggattacggttctggagggacccagcatagttaatataatactgtacattatcagaggaagcacataaaagaaaagggaccacaggagggatttaaacgtctgccggcaccgggacgatataaaaagtgtaatccctcctgtcccgatgttggccagaaaccccgccagcaaatatcttaaaagaagtccccctgccgttcccctggaggctcccatatagtataaatcagggaaaaccaattccccgcttgcccttaatccctctgtgccgtaaactcctgcgaaaagggcaaaaagtgccccggacaccgccagataaagaatacccgtaagtcccagcacggcccctgccttacagacggcattttttccccgcccatactctgttgtcatcagcacatttacggttccaagggcatactcttctgaaaataccggtgctgccgcaatcaccgtcaacacagccagaatcagtctggccatcatatgcatttcaagaaaatcacttccccatacatccccatatgcatactccaatcccccatccatcagcgcactgatttccggaacatcctgtgccctcaccagcgcagggaattcggagccccatcttcgggtagaaagggactctgtcacaaaccggttgcaggcattctcataatacccttttttggtgtcacctgtctccggatctgtctttagattgtctgcatattctgtccacccaaaagtatcaatgatatcctcagccttttcgcgggttaggggaccttcatagtttttggctgcctccaggttcttttcaatggcctccatccttcggtaacagatgccgtcctcatatacatactcacctcccagaacacctgtccaaaaataaaaccccaaaaacagaagccccgcaaagagtcccaggtataatatctttctggtacaaatcttatatatttctgtctgcaatatcttcatgcgctccccttccctcttctgtaacatacagataaacatcttccagacccggttccgccggtactgcattttcacagggcttatccaccgaaagcatgcggagtcttacctggttatccacatttttaagattgcttaccggatacctttctgtatactcttccactttgtccccggggatcatacattcccatacacagccatacatcctctttaccaactcttccgggctgcctctcccgataatcttaccctttttcataaggagaatctcgtctgcgatataggctacatctgccacaatatgggtagacaaaatcacaattctgttttttccaagggagctgataatgttccggaagcggatgcgttctctgggatccagcccggaggtaggctcatccagaatcagaatctccggatcgttgagcagtgcctgagcgattcccagtcttctcaccattcctccggaaaaggttttaatcttctgcctttcctctccttcaagccctaccagctttaagagttcccggcacctctcttgggccatagccttgggcagagccttcagcgatgcaaggtacataaggtaccgccatggggtaaactccgggtaatacccgaattcctgcggcagatatcccaaaaggcgtctgtattccctccccatattctgtataggaatcccgttgcagacgatttctccctccccggaagggagaagactgcatatcattcgcagcagtgtcgtttttcccgcaccgttttctcccagcagaccgtataccccatttgcaaacgaaacactgatgtgatctactgccattttctccttatactgttttgtcacccgatccagctttaactccagcatattttctctcctcccacagacagtttcttaaacagagaatgcagctccagccccagaagaaccactcccatgagaaacactcccccccataccggcagatacatctgtcggtatacacccgggaacgccccggggatcatggctgccagacccataaagaccgcagccgtaatctgaggccactttttccccatgtttctgccccagaacagcagaagcaggtagcacccgtgggagatcacaaaggggacaagaatatacaggcacagggccaatattccaaagtctgtttttctggaaagcccccctatcactcctgtaagaatagcaacgtttatactccctgatagtatcattttaattgcccagagctgtcccaggttaaaatagcagctctcttccagctctcccatctgaaaagactggcttctgccaagttccatcacggtcactatgcctatgcttgctgcaagaacggaagcgtagaacagatagggagcatcctcccgggaaagatttcccaacagaagaaataagactatccctactcccgcaaaagctccctggccaatccaataccctctggatatataggaaagctgacttttcagaatctccagccaagagggacagtacaccagtctcttataggcggctgcctcctgtattttgtaaagggactcctttttccttatgggatccaccgggagttccggcagctttattttgtcattccccataaaaatcctcctttctcagcatttttttcaatttctcggttccctgcttcatccgggattttacggtggatgtccctgcccctgtgacggctccgatttccctgtaggtaagcccgctgcagcagtgcagaacaattacctcccgctgcataggcggcagacgcaacaatgcctcccgtacttttcctatccgctcagccctcaagaccctctcactggcagcgtccccgcctatacactctccctccggattcagaagcgagtcccaaagcactgacctcctctttttctcacaatgaaaatagtctctgcatacattcatggcaatggcaagaaggtaccccttcagattcttgtggcggtaatgatccacataccgtatgaatcggaggaaggtctcctgggcaagatcataagactgatccgggctgccggtctgatagcagcagaagcggtatatgtcatcgtagtacttttcagcaatggtattcaggtattctttactgccctgccggatctgctcaatcatctggccgtcatccataaaacatccctccttattccctttacctatataactgccataatatcataaaggttttaaatatttaaataaaaaagtcttcaaacgctttgctctaagcgtttgaagactttactgcgttaagcctgaaataaaataaaggaaacgctgctaattcacgtttcccttactttagtgccgcagaccggaatcgaaccggtacgaagtttaaccctcgcaggattttaagtcctgtgcgtctgccagttccgccactgcggcagtggataaacaatccagtggatggagaaggattcgaaccttcgaaggcgttgccaacagatttacagtctgccccctttggccactcgggaatccatccatgcattgattttccaaagaaaaccaatggttattgcttctgacaagatccgattttaccacaatccatttgagaatgcaagtacttttcctctgttttcccggggaattcagcttttatttgacggtattttccggagtactaccgcagataccgggggaagttcaatctcaagcataccattattactctggtatacggttttgtcaaaggtatatccctctgcagtggtaagagctatccgctcgtagatatccacacccgctctttcagaccccagctgccatacaggaatcgtcaggaaggccgattcctgccggttattgacgctgatcaccatcttgtaatgcctggtgaatcttccataggtaagtctctgataatcgttgtgaagatattttaaggagccgtggagcagagactcactgcctttgtgtatctgaatcatacctttatagaattccagcagttccatatcttctcttccccaggggtaagttcttctgttatccggatctgtaaatccacagagccccacctcatcaccgtagtagatcgtcggtgctccgggccatgtcatctgcatgacaatggcctccctgaagacggctttgcttaccccctcctctgctgcccgggggcccagctgtgcaactcttcccacttttttgttggtcctggtaagaaacctggagtggtcatgattggataactcattcattgccacctccagagtcggctctgtcattctggataaatgatatgtcatagcattcttaaacgcatcgctgtttccgtaaaggcctccgttatactcatcgctgtgcttctccatccctgtcaaaaaccaggtgatgggctccatgaaggcatcataattcattatggtatcccactcatctccgtgaagccactctccggcctctccgtaatgctctgccaagataatggcgtcgggattggcctctttcacattctttcggaaatccttccagaatctgtggttgtattcgttgctgtgtcccagatccgcagcaacatccagccgccatccgtccacattatagggcggagatacccatttcctggcaacctccataatatattcataaagcttatccgatcgttcatagttcagtttcgggagggtgtcatgcccccaccatccgtcataagaatcgttgtaaggccatgcattttcattgtaaaagtggaaaaagctcctgtacgggctgaatgcatccacataagcccccttgtcatatccttccgcatactcataaatccgctctctgtccagccatttattaaaggaaccgcagtgattgaagaccccatccaggataatgcgcattcctctccggtgcacctcctccacaaattccgcaaaaaactggttgctggcctccaggttctttttgtctgtgacccttttgatatatttgccggcgtgagcattttcccgatcccagtctgccagcaattcgccgccgtcttccacaatttttccataatgggggtcgatgtagtcatagtcctggcaatcgtacttatgattggacggggagacaaatatgggattcagatacaggacatccacccccagctcctggaggtaatccagtttatcccaaatgccctgaatatcaccgccgtaaaacctgtgaatgtccatgggctgaggtgtttcgtaccaatccagcaccttctggcttttggcaccgatgtagaagtactctcccgtctccacatcattggagggatccccgttgaagaagcgatccacataaatttgatacatcacagccccttttgcccactgtggggtatggaatcccgggacaatggaaaactgggtgtaaatgggctgttcctttgccaatccctgctcactgaaatagcagcggatcctgcctgaggttatttcaaaatagtaatagatgggttcttcatctacctgtaactgtgtctcataaaaatcaaacccgcactctgtatacgcatagtccataagtgttttctgttccccccggacaatgtagactccgtccacattattttccagggttctaaaccggatcgttaccgtatcacccggatccggctcatagggttctctgtaattctgtgttctgtcgctatataaagcagccttgttaaacagcggccgcatatttgatacatactgctgaatcttacgaacttcctgataatttccatgttgcatcatattccgtcccctttattcaatgatggaaatgcctcttttcattttatacgctgacatcctccaatacaactattttcaaacgtaaaaaagacagctaccgaacgctgtcttttttggagaaggtatttcttcttatggggtgtagcaaaaactatataatgtattggggggtttttacagttattattatagcaagcggcaagggaaaagtgtgcacaatcttcactgatatttcagttcatttttgggcgtttttttacaccgtcccatttccctcttccgcctcctgctaaaaaatatacaaaaacccttttctgtcagtaaaaaaccttctaagccatagccttctcttcaaacagcgcttcaaactcttctcttccgattttttctttatccaataataaatccacgcatttatgaagaacatcctcatgactctggattaatgtttttgctttctcgtaagcttcatcaataatacgcttcacttcgctatcaatagtggtagctacattttctccgtagcccctggtatgggccaaatctctgccgataaagacttcttcatcgtcttccccataattgataagtcccactttttcggacataccatacttggttaccatagcccgggccagttttgttgcctgtttgatatcctgggaggcccctgtagtcacatccttaaataccagttcctctgccacacgccctcccagatccacaacaatatgctgcagcatctgattcttggtattaaacatctcatctttttccggaaggggcatggtatatccggcggcccccattccggtaggaatgattgagatggtgtggacaggccccacatccggcaggaggtggaacaatatggcatgccctgcctcgtgatatgctgtaatccgtttctctttttcagaaatgatccggctcttcttttcagaaccgattcctacctttacaaaggattccttcaaatccgcctgcacaatataggcccgttccttttttgccgccaaaatagccgcttcattgataaggttttccagatccgcaccggtaaatcctgcagtagtctgggcaatctctttcagatttacgtcgtctcccagaggcttccctttggcatggacatgaagaatctcttctctgcctttaatatctggttttcccactccaacctttcggtcaaatcgtcctggcctcagaatagcgggatccagaatgtccacacggtttgtggctgacattacaataattccctcattcaccccaaagccgtccatttccacaagcagctggttgagggtctgttccctctcgtcatggccgccgcccattcctgtgcccctgcgtctggccactgcatcaatctcgtctataaaaataatacatggggcattcttctttccttcttcgaataaatctctcacacgggaagcgcccactcccacaaacatctctacaaagtcagacccggagatgctgaaaaacggaactcccgcctctcccgctactgccttggcgaggagtgtcttacctgtacccggcggtccaaccagaagaacccctttgggaatcctggcgcccacctttgtatacttctgtggatttttaaggaaatccactatctcgactaagtcctctttttcttcctgaagtcctgctacattggcaaaggtgacttttttctctgcgtccacggacatcttggcacggctcttaccaaagttcatcatcttggcgttgctgccgcctcctgacatctggcggttcatcatcataatcataaagattaccagacctccggtcagcagcaggggcagaatagatgacatgaacacattatccccggggacatcgtacagggtcggcacaatataggacccttccagatattcctctacctttaccacatcgctcacataaaactgtctctgttctcctccctttaattccagcactacctgtcctgtgggcactgcattgttgggatgaatggctacttttgttatattttggctgtctacatctttcacaaaatcctgatacgtataagaattattcgttgtcacctgattggtaatgaaccaccaggccccgataatcagaactccaaggaccagatagaatcctaaccctcttgtttgcttattcacttcctgctctccttttccctaaagttctaccacacctatatatggaagatttctgtatttctgtgcataatccaggccgtatcccacaacgaactcgtccgggatattgaagcacacgtaatccacctgcacgtcccgcactctgcgctccggcttatccaggagcgtacagagcttcaggctttttggtcctctctggcgcagaacctccatcagatagctcagcgttcttccggagtcaataatgtcctccacaattaatacatccttgccctccagcggctcatccagatcttttacaatcctcactactccgctggatttcgtgtcgtcaccatagctggacacggacataaagtccaggctgaccggtactttgagtctctttgccagttcacaggtgaaaaatacgccgcctttcagcacacagattagatgtacgcttctgccctcgtagtccctgctgatctgctctccgatttcccgtattcttttctctacttcctcctcgctgagcagcacgtgaactttttcactcatgttgatttcctccttctacccgtacttctaaaacattttttgtctcttgggtaactttatagtattcactgatccggtaacccaccacccacagaatatgtgagccgtccgcaagcagaagaagctcctccctttctctgcggggcaccttgcagtcaataaggtaatcctttatttttttccttccgccggaggcattgatcacgagataatctcctggtctgcgcgtccgtacgtttagactatcttctattttatcataatcaaaccatttcgtatactttttttccggaattggctgattttcgtaggaaaaccttctccagctccaggcaggccggggcgtcccgggaagctctgcctcttcctttgccagccaaagcgcctggtactccatttctccctggattcttccggggagggaaacccgttttccagggccgctttttgcaaggtccatgagacttttgatatggtctgcccctatgtccttcaatccccccgccagttctcccagtgtcctgcgaagcacatattgctgaaggatctctctttcctgaaaaagttctttgctgactctaattcttcccttttcttctcttacatattcctctttcagtttccctgccagctcatccagataattatctgcttccaaaagcatcccggctgtccgggcaatatgtgaaactgtctgctcgttaatatcatgaaccagtaccggcaaaacctgatggcgtatcttgtttcttgtataatccagactcagattggtactgtctgtaagatactctatgcctttctgctccagataattctcaatttcttttctctccacgccaagaagaggccggataatccgctcccgcacaggtcgtatcccgcacaggccccgaatcccactgcctctggccaaatgataaagaaatgtctcagccacatcgttctgatggtgtgccaaggccaccttatctccattccattcctccataaatctctgaaacgcatcatagcgggcctttctccccgcttcctccagtgtcatatgcccttcctttgccatttgctccaccggataagaatactctatgcagggaatcttccactgcctgcagagcctgtccacgtatttggcatctctctttgcctccgatccccgaatctgatgattcacatggaccacaccaagcgcaaagtccgcctgtttctgatattcttttaacagcgcaagaaggcataccgaatctgccccgccggagactcctgccacaatgcggtccccttcctctatcatatgatattgcctgatataagcaaataccttattttccatcctttgtctcctactttttccagataccggccaccagtacggtcatatcgtccactgcccggtattcactatatcccaacacccgctcgagaatcccccgccccaattctttgggggcatttccccgggtctgcagtataatttctttcattacttcttcctggcggtccaggggcagcgcgtccagcaccccgtcggtcaccataatcaaaaaatccccgtcgtataatttctttgtggtagtttcgaagtcgatctgctgcaccagacccagtcccaggctggtggatgaaatcgcctctacccagttgttgcgtttgatgaatgttgttgccgctccggccttcaggaaatgccccataccggaatacaaatccatcacacagatgtctaccgtggagaaatgcccgtttttgccctgaagaaccagggctgagtttaccatttttgcagccgtctctcctgtgaatcccgcatctacaaactcctccagaaggtccactaccatctcactctcctgacaggcctccagaccggaacccataccatccgaaagacacataaaaaactggccggtatcctccatagtacacatataattgtccccggatacactctctttatccttggttatcttggccgcaccatacagtaccttaaaattaacatcctccacaaaactgtatgtagtaaattccccgttgatcagagatcggctgtccttgcgcgccaccatagaacatccgcattcctttgagagctgtgccgctgcctcattcaccgggatgcactgacctcccctgcttcgaagccgcataaaatactgctgttttccatccggaagctccagcatccagatacttttcagcacaatatttttcttcttcagcctccgctccagatcatccttgaattccggcagtacatcagtcacctcaaacatatctctggacataagctgcatgatccgcgccatctcactgagctgttccgctactgccaggcggttttcaataagtttgttgctccagaccaggttctgccgctccctggatatcatccggtacagctcgtccccaagctttccctgattcacacagatacccatgagctctaccttcccccgtctgattttttcctcatctccttcttccatgattctcagaagattgtatattctctgctgggtctgcagatactgcttctgccagcacacatggtgcagatggcatttctcgcagaagttctgttccacttctccaatcagttcttctatttctccattgctcagataatctttacggtaaggcataccgtaaaaactattagctaaacgctgaaaagaggttgcatatcgttccattttctctttctgtggatgctggtcatatacaatggttgccgcactttttttcattcctgaaaaaatagtttttgccatgtcccggataatcagtagcgcgctgattacgagcatggcaataatccattcctgcatctatgattacctcccctgaattagcattcgctatcaaaggtgtattatagatgttttttcctttaatctttgtcaaaaacactactctgtgcttaaaaacttttagacaaaatatggtatttactgagccggctacttttcctctttgaatacgatctcattgttcttaaccaatcccagtttatctcttgcgactttttccgcgtattcatctgactgcatgtattcttttgtctcttctatctcttttgtacgctcttcttccttctttatttcttcagaaatcgccacctttttcgcctcgttgccggcaaccttttttttcagagccgcgccttcgtagaggagtgccccaagaagaacacacacgacaaaggttatactaatcatggctatccggtttcggacgccttttctttttttcttttttgactgcattcttttttttgtccgttctctcatcatttttcttcctgactttccttgctgacaaatagttcaatactaaaattttacctcgtgacagtggaaatttcaacctttttatccatcgtgctgtcaatttcagaggtattttaaggaaaccttttattttatttaaaaaaaatgatatgtattttactaatatttcgctgacactgtaatgatataaaataactcccagaagaatgcctgcaagggcgtacaggcgtatgacaccgtcattttcctcatacattctggaaaacagaaaaacaccgccggccgtccagtacaggatgtcttctatactgatccacagggcagggtgagcgcagactctccggaaaatccgcagtacatcataagctgccaccatcagaactcctgcccagacagagctggcaaataaaataagctcctgattcatatactcgctcataggcgcttatttgaacagccgtttcagcagattctcccctgctttctggccgtggattcctccctcagtataggtcagactgtctatggtcccctccaggtctacctcctgcttttccagattcagtctcgtaacatggaggtcctttcccttgatcgtcagcattccctgctgtgtatctaataaaatctcattcatatcgaaggataccacatccctgacgcctgtaacattgcctgtctggcggtttttcagtatgaaaccatggagcattgtcggttgcttctcatccacaatacagcttcctccatctatactttcttccatcattatatgggggattgggctgtattagtactgtatatctctagagatagcggaacattttatccgcatcttcctttttcacggtctcttttacctccagtatctccgcttttacaacattgcttccaaactggatctccaggatatctccaggcttaacctttgtagatgccttggctggtttgccgtttaccagaacacgtcccgcatcgcatgcttcgttggcaacggtacgccttttaattaaccgggaaacttttaaaaatttatccaatctcattgtctgctcttcctttccttttccgccttcgggcctgtcggcaccagccccggggtatataaaaagggactgacgaatcagtccccttattcactcaatacttatttttcattaactaagtcttttaatgcttttcctgctttgaacttaggagatttggaagcttcgatcttcatggtttttcctgtctgaggatttcttccttccctggcagctctctctgatacttcaaaagtaccaaaacctactaattgaaccttttcacctttttttaattcatcagaaactacatctacgaacgcttttaatgccgcctctgcgtctttcttggataattcagttttttcagcgatagccgctaccaattcagttttgttcatgagtatttcctcctattgatttgtctacaataaatttcgatgccatatcccaatgcttactctgcatcagtggctacgccccaaaaacaagcgtgaagttctaataactctattgatagttataacctctttccctgtgtttgtcaagttttttaggcattttagcggctctttcacagctttttttccgcgtttttccgggctttttcctctttctctctcttttttatctcttcccaggtctgcagcacctcggcagaagaattggctgtgccccggccaaagacatgaggatggcggcggatcatcttctcactgattccctgtatcacgtcatcaatggtaaacagcccctcttcctcagcgatctggctgtgcatcatcacttgaagcagcacatccccaagttcttcgcagaggttgtccgcatcctttgtctcctccagcagacgaatcccctccactgcctcctgcgcctcctccagcatacacggaatcaggctctcatgggtctgttccctgtcccagggacagccgtcaggggcccgcagtctgcggatgatttctctgaaatctgtgaatgaatatcgtttatccataaaaggcttgtctcctacagcattttgtcaaccatttccagtacggcttttccaagagcctgtgatttttcgtcggcatcggccagagaggttcccttgattccataatagaacttaacctttggctcggttccggaaggccgtacgcatacccacgcatcgtctgtgaggtcatagtagagaacattagaacttggaaggccggtaggggtaacttcccccgtctccagatctgtgatggtatctctcttatagtctctcgctgatactacctgatatccaccgatttctgtgggcggctccttcctcagtgtgtccaggatggactggatcttcgccagtccctcgattccctttaaggtgacggactggatatcatccttataatatccatatttctcatacatatctatcatggcatcccagagggttttgccctgtgtcttatagtaagcggcagcctcacaaagagccatggtagctacaatggcatccttgtctctggcataggttcctataaggcagccgtagctctcctcaaaaccgaacagatacgttcctcttttatttttctcaaagcccagaatctgctggccgatatatttgaatcctgtaaggacttcaattaaacggatatcataatgtctggcaattgcattggccatattggtggtaacaatggtcttaatcagtgcgccgtcatcgggaaggccctggagttctttcttctggctaatctcatattccgccaatagacagccggacatatttcctgtgagtgtgtgatattctccggttctgctgtcctttacccgcacgcccagacggtctgcatcagggtctgtagccaaaacgatatcagcatccacttcctttgccagcttcaatcccagctcaaaggcttcctcagcctccggattgggatagctcaccgttggaaattctccgtccggaagttcctgctcttttaccacatatacattgtcaaagcccagttcctttaatacccgtctcacaggaatgtttccggttccgtgaagagggctgtacacaatcttaagctccccggccatctttgaaatggcatccatatgcagtacctggctcttcagctcctccatgtatgcatcgtctatctctttgccgattacctcgtaaacacctgcttttatggcttccttttcgtccatggtctttacattactgtaatccgtaacctttttcacttcgtccataatcccggagtcatggggaggcgtaatctgtgcgccgtcctcccagtatactttatatccattatattccggagggttatggctggctgtaatattaataccggctacacaccccagtttgcgcactgcataagaaagctccggagtcggccgcagggattcaaaaatataagccttaattccattagcagcaaggcaaagggcagcttctttcgcgaactccggggacatgcggcgggaatcatgggcaatcgccacaccttttcctttcgcccccacagattcaatatagtttgccagcccttgtgtggtcttcctcaccacatatatattcatgcggtttgtaccagcaccaatcaccccgcgaagccctgcggtaccaaactccagatccatataaaaacgttctttaatttcattttcatcttcagcaattgctttcaattctgctttcgttttatcatcgaaatacggattatccagccattcttcatacaattttttgtagtccatattcttgtacctccctgcaataatgttttttctattatagcagattcaggtaataatgcctagttttttccccgcattttgcacatttcatctaaaaatcccagccaaacgcccttctgagcgataagtgtatccagtttttcctcgcttttttgggagacccaggccttcttgtgattgtaataataattggccagcttccagaatttttcaggatatgcaaaccgcagcctcagattatccagctccatgccggacaagggtctttccttattgtattcctccagcataagtgttcccagttccttattccaattatgcttttccagaatttttctcataaactggtagagatctgctgtctggatgtcgtaattccacttgtcaaaattcgtaaccgcaattttctgattcacgaacagtacgttatgctggttaaattccccgtggcagatatcccccctggacattgcatctttcctaagggtatcataatcagacgcaatcagctggcggatcacttcctccccctgagccagataccatcccacactctccaaatagcggagctcaaatctgttcttctggcgtttgctgcggataaacttctggatctttctcaattcagcattatgtctcccgtattcctgaagcagggattcctttacataattctcctccacaggcatgtgcataattttatgtaaactagccagagctttaatgctcctcagtatatcctcttttgcctttgtatcgcattccctgccctcataccagcgcctgagataatatgggatattatccttatcaaaggacaccagctgcccttcctgatttgcgtacacagtgtcaatcaacagttcgcctgtctccagctgtctctgcagaacttcctgctgcaccagctttttcgcagacccctggaactccttgatcagcacaagtccctgctgggtattacagatgagggatcctctcccccggtatgtattagtcgctgttaaatcatactgctccaatatacttaacccacggtcatacacttatgttcatccccctttattttgcgtcctttttattttatgaaccccagagcgcaaaaatgccaaaaggggacgtgttccttttacaaagaacacgtccccttttgacttcagggtgtcccatattcagtttgacctgtccctttttaggtcttccctcattacctgaagaaggaagtctctctggttcctttctggcttctccaacacaagttcaaggagccggttcagctcttccccaatcgcctttccgggcttcataccgcactgtatcagatccctgcctgtcactgccagatccttcagggatacgcattgtttttcttctattatatgctggtacatctcttctacttcatccagacgtctcagcttttcttcctgctgataattgctttgggccaaagcgtctgccctctgcacttttaataagtaagggtacagttcctccccgactttgttcacagccctgcgcactgcgtgatatttgggctgcacccagtaatcgtgccattttaccagtctgcttacttttgcaatggtatcattatcgaatttcagacggcggaggatctctccggcaagcttttctcccactgcattgtgggtcttaaaatgatcgattccttcctcatctgtcgttttaaccataggctttcccacatcatgaagaagcatcgtaagccttaatatttttatattttccacatactccatggagcggatcacatgttcccccaccgaatacttgtgatgaggattattctgagctgtttccatcatactgtcgaattccggtaagaactgctttgtcatccctgtggcaaaggcttcccgcagcagatccggatggtctgatacgataagttttaccagttccgtctgtattctctccgcgctgattgccttcaggttgggcgccagaagtttaaccccttctcttgttccggactctatagaaaaccccagctgagcagaaaacctgacggccctcagcatgcgcagggcatcttcctgaaaccgttccaaaggttctcccacacagcggattctctttttttctaagtctccaatcccatcaaagatatctatcagcccgtcccggtgattataggccatagcatttatagtaaaatcacggcgctttaaatcttctgtcagactgggagtaaaagtcacctccaggggatgcctgttgtcttcatatgctccgtcaatccggtaggttgtcacctcaaagccttcttttcctatcataaccgtcactgtgccgtgtaccagccctgtatctaccgttcttccaaatatttttttaacctcctcaggcctggccgaggtggtgatatcccaatcatccggagttctcccaagaatcgtatcccgcacacacccccccacggcataagcctcatatccatggctgctgagtgtttctatgatggattcaacctttttgggcatatctatctgcatgcgttcacctccttatgaaaaacaaggaaacagctattttcaatttctgtttccattgaaaatagctgattcccactcatgtgcccgcaggcacttctcttaactagacggtaaaacggatctcccgtccggttctgctgtatttataatatcgcacacccgcggcatccatcattcgctttgacccaacgacggagggggtatctgcatatttgtcattgtcatataccaccgttttaattcctgcctggataatggccttggcgcactcattgcacgggaataaggacacatacagcttagacccttccaggcttcccccccggtagttcaggatggcattcagttcactgtgggtaacatagaggtattttgtatctgagggttctccctccctgtcccatggaaattcgtcgtctgagcatcctctgggaaagccgttatagcccatggacaatattttattgtccgcgctgacaatgcagcaccccacctgagaattggggtcctttgagcgcatcccggccagtttggctacccccataaaatattcatcccacgagatataatctgttcttttgccctgcatcttagccctccctgcttatttcgtgccaaatatacgatccccggcatctcccagtcccggcactatgtagccgtgttcattcaggtgatcgtccagggcacctacatagatatcaacatccggatgggtttcctgcagtttctttagcccctccggcgcagctataagacagagaaagcggatatttttaacgcctttctcctttaacatggcaatggcagccacagcggaaccgccggttgccagcataggatccactacaaagacctcccgctcgctggaatctgccggaagcttgcagtaatactctaccggttccagcgtatccggatcccggtacagaccgatgtgtcccacctttgctgcgggtatcatggcaagcatcccctccaccattccaagtcctgcccttaaaatcggtacaaccgccagtttctttcccgccagctccatagcctttgtctttgccaggggagtctctatctcaatctcccgaagcttcagatcccgggttgcctcataggccataaacatagctacttctccaaccagttcccggaattcctttgaactggtgccagacctgcggataataccaatcttatgctgaattaaagggtgttccatcaccattacctttgccacaacgcttcctcctttgtctatagaaatgcttattaattattcctcttcggattcaattaagtcaattctcctctgatgtctctctgcatgggaaaattcagtatttaaaaatgtatctacaatttttacagcaaggcccgggcctactacccttccgcccagagcaagaacattggcatcgttatgctgcctggtagcttccgcacagaaacagtctgtacatagggccgcccggattccgggcatcttgttggctgcgattgaaatcccaatccccgttccgcagataataattcctttctcacatgttccgtctaagatggcacgtcccacttttctggcatatacagggtagtctactgcctctgtactgtcacagccgaaatccttaaaagggatctccttctctttgagatatttgataatttcctgttttaattcgtaacctccatggtcacatcctaaagctatcattctagtatttcctcctcacttagttttattaccagttcctccatcaaccctttgagtacttcataaaataaaccgtactcgatgagcggagctccataaagtgccctcaaatccccgctgtgtcccagaaactcacgcactgtatacacatgctttaaattactgtattcctgaaacaccttttctttctgactgtcttccatcgtcagaagcagcacaccggatccatctccaatatcatcctgtgtcagcggttttgacatatgtttctgtgaaccatatccattgctgattagaatcgcctctgccttctgattcataggttccggaaaaaggactacaagtcctctggagtgtatggaaatagggtaatccattttcatagattttaatactacctccgccataggactccgtgtggtatcactagaatccacgaagataattttcagatattgcttcattcgccttgctccttacacataaatgattcggtgaccggcagctttcagcagccggttcataattgcctgtcccatctggggcgtccggaatgattcagaaaatataaagtccacatctgcctcatcaaattcccgcaaaatgccaaataaatgcagagcaatgctttcttcttcttttcttgtgccaatgcttttcaccacatccgcccgatactgaccggcagtttcatctgtcccgataattcccactcttgcaccttgtctccggaattcgtcagttaactcattaattctgcgaaccaccagagtactttcaccctcaacaatcgtaagctcagccttaggggcataatgccggtatttcatccccggggctttgggctttacggtttcatctgtaatcagaagtcctttgtccatctttactctgccgacaatcttttcaatcatctcctggttaatataacccggtcttaagataacaggtacctcttccgtgcagtccacaatggtggactccaggccaatccctaccatacctccatccacaatcatatcaatcttcccctgaagatcttcaatcacatgtccggcctccgtagggcttggacgccctgacgtattggcactgggggcagctataaaaccgcccccagcctgtattaccgccatggcaaccgggtggctgggcatacgtacagctacgctgtccagtcctcctgtggtttcatagggaaccttgctgctcttatgaagtatcatagtcagcggtcccggccaaaaggcatctgccaatgcctcagcctgccagggaaaatcagaggtaatcgtatccagactgtctgaatccgcaatatgaatgataaggggattgtctgacggccgtcccttcgcacggtatattttctccgaggcgttcgggttcagcccatctccccccaggccatagactgtttccgtaggaaaggctaccagtcccccccggcggagaattcttccggcttcttctatcacatgccgatccggatccttaggatccacagttactatttttgtctccatctcgtacctcttatcagattatacccaaaggcactgtaaatacatgtcccttgggcaggcatacggccttcgccgcatgctaaagtatactctttaacattataccaccagattaggcaaagtaaaatatttttttcagcgttcaggaaatccgtgtccccagtcaccaaactccctgactcttatggattcacaatattccggcactccctgccttccagcagatccagagcattgcacaaggcaatatccagcatcttttctgtagcttctctggtatttgcccctatatgaggagtgatatacgcattgtccagtgtaaacagcttatccctgccgggcggctcgttctccataacatctgctccgtaaaattttagtttgccgctgatcagaccatcatatactgcctcatgatccaccaaagcccctcttgccgcatttatcagtccagctccgtctttcattagggcaatggtctcacggttaatcatatgatgtgtctgggcattggccggcatatgcagagagataaagtcactcttggtgagaagttcctcctccgtgacctgccttaccccattttctctgcaaaactcttccctggatataatgtcgttggctaaaatattcataccaaatgctctcaggcgcagcgccacccctcttccgatcgccccaagcccccagatgccaatagttttccccttcagctccgtgcatttttctccagccttccagcagtattccctgcacgctgaaacacgatcgggtatctttctggtacaggctaacagaagaccaacggtgagctcggccacagaatccgaattggcgccgggagcattgcacactgcaatccccctctctttggccgccgctacatccacccggtcaaatcccacagcgggcctggatataatcttcaggcaatccggaagccgttcaatgacatcccttcgcatccagtcagtccctgtgatcagcgcatctgctccctggacaaaatccagaagctcctcctgtgtgagattctgggatttgctgagaaccacatctgccattcggaccgcccgtatccaagttggatgatcttccggaagcttcgcatagtgacaggtaattgcaatcttcataaaattccccctttacttcatatgggtttctctgctacgtactttattataaagaaatgttttaatcattttaagaaattcgctctcttttttgtagacaatagttattttatttatatattgtctattcatttcccagatattccaaaaccccctggcatacagcttccgcgaccttatcctgatattcttttgtctgaagttttgcagcctcatccggatttgtcaaaaacccgcattcaacgatagtaaggataccctcactcttttttaacagatagtaagtgctgttgcctttctcaaccctgggccgggcaacctccagatatgtattcagctgatcctggatggatttccccagcttcgccccctcaacagaatgtgtaaaataaaaaacctgaggaccgcagactgatgcatcgggataactgttctgatggatgctgattgtcataaccggctttttttcttttatcagattgcatcggttctgcatatcctgaacttttttattattggtattttcatcgtaaagcccttcgtctttggttcgggtcattacaattgtgtagccctctttctccagtttcttttttactttctttgcaatctgcagattgatgtccttttctttcagccctccgattccgataactccaggatcaatgcctccatgtcctgcatctaccacgattacttttgcatcctgtgaaagctccttactgactagctcagccccttcttttgacagaaaaaatgcccctaccagtagaagaaccgccatcagaagctctatcgccttttttctcataatgagaagctcccttaaagcatattctttaaagtatatgctttaagggagcttctaataatcccaatcttctggctctagtcctccagttcatcatccagatcgtcgcccagcatactttgaatcttattcaccagctggtcattaatctcatcttctgcatcgtattcatccagatctgcaatactgtccagagcatccagcacctccagctcctgggtatcccccagatgaacctcttttgccttttccttttctatctcatgtatctctatctcttccatcgggtgcagaagatccacatcccgttcatcttctatatcctgcagggaagttggcatcgtgctgattatctggtgtacctctttataagaagccataaagcgtttttgagcctggttgatcagttccacaatgccgttcatctcatcctgaaccgcaaggtactttttcttgccctcaaccagtttgtcgtcaatctcagactgcacggaatctaccctgcgttttgcctcttcctctgcctgagtaataatttcctcgctctttcgctgggcttcagcaaccatatcctctgctttcacctgagcttcaaataccagccttccaatactgtcgtaacgttcaatatatttctggtatttgttatgtatctcttcttccagcctggcctgctgagcatcctttaactccaggcgcttgatcagctctgctatcttcgcgtccttagcctccatctccttcttcagcttggcaagccttgatgcagaatcgtccttcagcttctgcacctgctccaaaacatcctctttatcaaagcctcccattattgtagtcttaaacatttcctgttcgcccatatactccacctctttcttctgactcccggtatcctaattcacatatttactgattaaatcccagacactcgggcgttccaatccaagtttccattctgcaaccccagccagctcatactgctgtatcagcttcagtttttcttccagcgactgttcgtcctccagccatattttataggtagcatcttctgtggaaagttcaccgtagttctggccggactctttatcccagaaagtttcgatctggttctcactgatataagcagatgcctgatccattgccattacttcactggtcacctcgctgccgctgtccggaaccttccacagtctggtgtaaaacggtatcccgttaatcacccggtctgccggcacttcttccagcgttttttcaattcccttctgcacgaaaggaagggatgccaccgaaccggcctcttcatcacccttaaaatgctcatcgtaccccatgatgatcacataatctgccaccgctccctgctcctttcggtcataaagcatagtataattctcaggaacaggattatctatagataataccagattgttttttctgcattgaatggagagttctctgataaactgtataaagtgaggcccctcctcctctttcaggctttcgaagtcaacattaattccggcagctcccgcaccaaggacagcctgtaccagattatttataaggttctgcctggaggttgtatgagacaatacctcatacgtactcatctctgtattaaaattatctaccagcgcccacacttccatgccgagctgctttgctgcagccacataattggcatctgcaagggaagaaatatttccggaattatcactcacagaaaaccatgtgggggatattgtattcacaccttttacattggctactgcctgcgtcaggccgtcattggctgcctgagaggtaacctgatgccacagaaggttaatcttataatccctcctctggcttgtgtactccggtgctgtaaaccctgaagttgactcaagcatcttattctcgggacttcctatatcctttttctgcacatagccgataaacccgtccgaagaggccaccttactccactcttccagctcctccaggagaaccatagtgtcccctttggccacatgggttaaaatctcgcttttaatcccgcctctatagcgtatcaccgtatcatcgctggctgttacctcagatacctctccccatttatattgaatcacaactttattgggagattcatactgctgaacatccatgtccgtatattgttttacaaaatcaagagccagatacccctcatccccctcttgtttaaagattacataatctacggactgttcctgacccgatacctgataggtattgccatctatagaaattgttataatatctgtaggggtggtatataacaatttgttctcattcttatcccagtaaaaccgtttgttcagggtactgctcacggtaccgtaatccagatatactttcccgtcaattaactttccttttttctcacttaccgcatcctgcaggatcactgccacgtcatcactgttttctactttataatatgtacccgcatccatctccttgtccgacggcgtgtgtttcttaatcgtcatcgttacaatgccgaccaatgctacaactactaccagcagcatagcaactaaaatcggtattacttttttcttcattatgtttacctcctgctttccgtaccattataacatatttttaaatttcgtcattaccttattcgacattttatgtttttttcatacatctaaaaaaatagcggctcttttcccatatcataccaaaatgtatcctctgcacagacagattatccggcagacttcatcatcccggatcaaataagcggcctttcagctgtactgtgggaccttatcgactaaaagaccgcttttcttatgtattatttagtttttacaaaatcaaattccagcttctctatctctcctttctcattttggacatagtcacgcatgtagactccgtcttcagcaatcttatgtgccttttctatctccctgggcgtgctggccttgccgtccagccacagagagattccttgtttttcataatgctttaattcctcacggagagtttccgtctttttggaacgttttttccccatactttttacggataaccagcaaaatcgtgatatattataagctgcagctaccccttctcctttctgaaacaactttactgaaaagcgccaaaaataattagaaaagacaaggattctgcagtaaacttctattcaatataaatcattgttttgggaatctaagaacaactgaatctgttcgttcttttgcggcagagacaccgcatgattggaatacagaacttttttacttacatgggaatactattatctgctgttatctttagctaccacatcctttcctgcgaaaatgatgtgcagtttccctgacttttcttatggttattatatcttattttgaggggattgcaagagattttgtaaaaaaatatagttttgtgtatatgaagctcgaggtgaaatagtcggcgagcggggtgtcc

SEQ ID NO: 274 - DNA, 56695 bp, Lactonifactor FBI02339
  source 1..56695: mol_type = genomic DNA
gggacgtgttctttttagaaagaacacgtccccttttgggatcggcctgtccctttatacaacagacccgtccctacatgacttcttccccgtctgtaagatgcccgaaactatcctggacatattcgataaatgtccgggatacatcgcttaacatttcttctttggttgccagtgccagattcactatgggatgttctttcagatagacgatatgtattctggggtctttcatatactcgatagatgccttcatcataagagagatgccctggccgtttgccaccagattcttaatggtgctggagcggaggtccaggcatcgttcttttggaatgaaccccgcctttttgcatgccttgatgcaggtctgatgcataccggtattggctcccaaaaaaagaaattcttcatcctcggcctcttttaggtcgatttcatctctgtttgaaaaacggtggtcctgaccggtaatcagtaccagttcatcatcgatcaaagggtaaattaagaattctccttccggaatatgatgacttctcagaaaaaccagatcggcatctcccttctccagatcctggactacgtagcttccgtccttttccagaacctttactcttaccccagggtattgctgctgaaaatgaaaaatgatgtccgtgagtccgtaatgattcatgacaggtatggcggctatcctcagggtgttcttggattcgtccgtatatctccgaagtctgctgagcatttctttatactcctgcagaattctttgagaatacatcacaaattcctctcccccctcggtgagctcgatattcctggtagtcctgtcaaaaagtttgaatcccagttcttcctccagtgctttgatttgcttggagagagaagactgggagacaaagctttcttcggcagcaatagaatagttcttatatttcgcaattgccagaaaatgttgtaattgttcaaatgtcattcatctctctccttttatgcctgctcaacaaactgtcaagacttattatatcgcaagattccgacgttatcaagcggacatgaaacttaatctgacatcggttcgcgtacttattcgttccaggaataaaaagggagggaaaagcgaattgatacaacagccataaaaaagtaaacttaagtcataaaataaaaaatgcttaagcagtatataaaaaataagtgtggaaaaggagaatgagtatggcgacaaaatttaatccaatcctggatcccagagggtatcaggaaagaaaaatgattcagctggcgccccgggtatctctggaagagctgaagtcaggcaaaatacttttttataataatacaaaacttggattttgtaattattacacggtgtttgatcgcatcaaagagcactttacagaactggggattacaaacttcgtagagtatacagaaactgtccgggggaaggatgcggaggctctgaagaaatatgcggaaatgctggcagaagaaaaaccaacggcggctattgttgcctttggtgatatgggaacttcttcttccaccaccgtgttaagcattgccctggaagagctggggattcctactgtctatatgacagcacctccaggaaccggaatcacagagggcgtcggtgtataccgtgcaggacatctctgcctctgttcggtagacatctatcaggcaagtaccgtagaggaagtggcggctcaggtggatttaaaatgggattacatcatagaatctctgaccagtaacggagaaaagctggaggagcttgcacacattgactttaagatggacaaagtacctccgagagcagacggactgctcccagtgacggaggaattagatatagaagaagaaaaactctgtgagccgggtgcttatctggaggaaatcaacgatttcttcaatgcagagcatatcagcgacgggcttccgattattcctcctacgaaagcccggtacgagaaaatgatggagtattgtccatttgaagaagatctggtgctgtgcagccccagcggacccagcgggaagactgttaccgttaaggatgtggcagtggcagcaattatggcaggatgtaaacccacggccatgcccatactggtagcagtatttaaggcactgaacagccccctgtataacctgaaccagtctgtgacaacctctcaccccggcggcaacatggtaatcgtatctggtcccattgcgcaggaaattggaatctccggcaagcagggctgccagggaccgggctatccggccaatgcgaccataggaagagccgttaacctggttattatgaatatattccgctcagttcccggggtatgtgatctggactgcattgcttcccaggcagaatttacctactgctttgcagaggagcctgaactggcacagtggaatatgatcaatgaggatcgctatgattcagatacaaccacagtctatgtactgaaggcagaacccattcatgatattatcgacttcctgagcttaaacggacacgatctgctggataccataacacactgctgtaccacacttggatccaacaatgcctatatgcctggcccgctggtagtctgcctgacgcctgatcatggaatgatgctgaagaagtccggttatacaaaggaaatgattcaggaacatattcatcagtatgtatatcatgaggttcctatggtccgcaaccgtggacttgtaccggtgcgtccgaaagaatgggagaacagacatcctctgccagtaacgcgctcaccaaaagatgtggaagtagtagtgatcggcggccggggcggccattctggtgtaatccttccttgggcgcttcacagcgaaggatgcgtagagccggtagctatgccggatggaaccattgcaaaatcaattgaagatttcaaaaaatagaaaaataaaatgaaggagggcacgttatggggtacgacacacaatatgatgtaattgtctgcggcggcggaacttcaggtgtggctgcggcaatcgccagcgcgaggaatggtgcaaaaaccttattgattgagaaaacaggaatcctgggaggtcagatgagtctttccggacctcccggatttgcctatgcaagattatttaacccccggggcaaaagagatatcggagggctggtggaagaaacatatcagagacttctgaaatccgggcatgcgctgcctgagtggagaagcaagatcagggaaaaagcaggctacaccttttcctatgtagatccagaatggtgggtatacctcatctttgaaatgatggaagaagagggtgtggaactccttttagacactctggtggtaggggttaccaaggaggagagcaccgtaaccggaattatcgttgaaaatgctaacggcagaaatgagatgaaagcaaaacgtgtgatcgactgtaccggagagggatatgtggctatccaggcaggatgtgagactgcgtgcgtcagccgcgatattatccagccccataccctggcattcaccgtggacggggtagactgggacaagctcttaacctatatccgcaccaatccggatcagttttcctttaaacagttaatcttcccctatgaggatgcaaatacaagggaagaagtagaagatatgtaccgtaagtgctacgacatcaaagagctgggagagatcatgggcttttatgagctgcgtgatatggccctgaaaaacggagactggcatccatattcaggagccgggttcttccttaccccaagagaagggggacacattcaggcccacttccagcattcctcccaggtggatcacgcgcttcctacggatgcgtgggatcttaccagatgcaacattgaatgcaggaagcagaatatgattgcctggagattcttcaaaaattatgtgcccggatttgagcacgcatatattaccaagacctgcacagagcttcgtctgagagaaggtcccaggattgtgggcgagtatatccttaccagggacgacgtggaagcatgccgtcagtttgaggacacgattggcaagacttccttcaaggcaggtggataccatgtggcagccatggatacactggctgtatgcgtggacggcaaaacagatatggcattcccaaaggatggaggatcttacgatattccttaccggtgtctgcttcctaaaaccattgacaacctgctggcagcaggcaaatctgtttccaccgaccggccggcatacctgcgctatctccaccagaccatggtaaccgggcaggcggcggggactgcagcggcactttctgtaaagaaggacgtaacccccagagaacttcagaaggatatcaaggaactgcaggataatctggtagctcagggagcgatcctgtttgagacaagataatagtaaggattgtagataaggatctccgtcttgcgttataatgctataatgtggggcggagatttttgcagaaagaagggagcagtactatgaaaatgatgattgacggacagaagacagagtccggtgacggtaaaactataccggttatcaatcccattacaaatgaagtgattgacaccatacctatggccaccaaaaaggatgtggacagggcgctggaggcttccaaaagaggactgaagaagtggagcgctgtgcccctaaaggaaaaggaagttatttttgagcgctttttccggttaatggaggagaacaaaagggagattatcggaaccctgatgcgagaaagcggaagcagcgtgcgaaacggcctgtttcagtggcaggggataccaggtctgttccggggatacctggagactgcaaagcgctgtgacgggaagcttttagtgcccggcactgaggccgggcatgacggcaagacggagcaggatctgcagatggtagtttacgaaccggtgggaaccgttctggctattgtacccttcaatgctcctctgatgcttttcggttacaaagttgccccggctctggctgcggggaatgcagtaattgtaaagccgcccaccagcaacccactggcattgatgaagctaatagagctgctgtgggaggccggtgtgccgggagacgccctgcaggtggtaaccggtgcagggggcgacattggggattggctggttgaagatcccagagtggatgccgtgacccttaccggaagcacagaagtaggactacatatagccggcatcatggccaaacggctggcgccctgtgctctggagctgggggggaatgatccttttattgttctggaggatgcagatgtggaggcagccgccagggaggcagcagcctggcggatgaattccgcggggcaggtatgcatagcccccaagaggttcattgtacagaactccgtgaaggaacaatttacgaagacagtactggatgcggtatctaaaatagagatgggatatgatatggacgtagaggcagagctggatcagtacattgggctggacttctctcagctgaagccgggaaaaactctgatgaacagtctgatttcggaaaaggcggccattcaggtggagcaacagataaagaagaccttggaccagggggcaaagcttttgatcgggggcagacggaaaggtgcgtttattgagcctacggtaattggcgaggtggataagtccatggatattgcccgggatatggaaatcttcggtcctgttatgcccatcataggatttgacactcctgaggaagcggtggaaattgccaacagcagctgcttcgggctttcgggctgtgtgatgaccagagactggaaaaagggcatgaacctggcgagaagcatagagtccggcggtgtggtagtgaacgggacagggacctaccggaacatgatgcagccctttggcggatataagctgagcggtacgggaaaagaaggttttaccactttgggagaggtcgtaaaggaaaaagtaattgtattaaagggatttctgcagtaagagactttccacgggaatggggtatatattctttgggggaatagattggctgagaaaaccgaattgataaattgtataaaattgctatattataggcttaatggtaataaaaattggtaaatacatacaagaagggagggctgcagaaacaatgacaaggcgtgaaaatgtgatattggctatgaaacatcaggaaaccctgtggattcccaataatattacagactgtgacatcgtattgcagcaggcggtgcaggagcggtatgaaggccgcacggagggccgggacgaattcggggtagagtatgagtacaacctggaagccaacgggcctgtacaaaaggtaggaactcgggcggtatcctgcgtggaggaatggaaaaaggaaatagtctttcccaacgtggaggaccgggattgggaagctctggcagccagggataccgcagggtgggacagagaaaataagttttccattgtccagctgttcaacggtatgtttgagcgggcgcatctgatgatgggatttgaggatgtgttgtgtgcactgctggaggagccggagataatggaagactggttccgggaatttaccgattacagactgaggctgatccggcaaataggaaaatattataaaccggatgccattatggtttttgatgactacagtgcaaaggaatctatgatgatgtctctttccacatggcgggaactcataaagcctcagcttaagagaatggtggatactgcccatgaaatgggaatgttttatattctccactgctgcgggttcatgcgccccatgatagaagactttattgagcttggagtggacgctgttcacccggtacagatctccaatcatccggaggaactgaaggcgaaatacggcagggacttatgtttctgcgggggatttaacaatgtggagattctggacagggaagatgtcaccccggaggagagccgggaggagatacggagagtatttcaaaaggttgccccgggcggcagctttgtggcctggaaacccttcttctgtaagcatccccgaatcttttttgaggagttaaagcccctggtaacagaaaaaatgagggagtatggagcagagatacccccgcagcttcagtagataacatctaaaaggaggaaatttggaatgaaaaatcacagcttttcagtaaaacaggatattgaatttggtgtcggcattgttgaaaaattaggggaatatattcagagactgcatgggacccgggtgcttctggtatctgacccgggtctggtgaaggctggcattacggggagggtggagaagattatcggggctgcaggttacccctgtgtgacttttactgatgtggagccggaccccggctgctgggtagtggaaaaagtagttaagactattgtggaagaaaaagtggactgcgtggtggcagtgggaggcggaagctccatggatacggcaaagagcgctgctctggtggggtacagcggaaagcgtcttcaggacttctggggatactatcttccggtggaacatgacccgattccggtgatcgccatccccaccacagcaggtaccggcagtgaggtgacaagaaatacggttatcacagatgagaataaatacaagatggtaatcctgaatgataagatgcttcctcaggtggctctgctggatccggaactgataactacactccccgcaggagttgcggcttccacaggaatggatgctttgatccatgcggtagagtgctatatgagcgatctggcgactccgttttccgactctgtggcggaaaaggctatggaattgatcggacctgccctgccaaggtttgtggcgaaccgggcggatatagacgcagcctctgatatgattatgggaagtacgctggcgggaatcaccttatccctctgcctgccgaaccaggcccacgctttatcccatcctctgacggggttctaccatgtgcctcacggactggccaatgccatgctgttccccactaccatggagttcaatgcgcttgccgacaggggaaaatataagaaagtatataatctgctccgcagggaacacgcctacacagagaactttgagacagaaatgctcattgactatctggtgaagctcaatgaaaagctgggcctgcctaagaatctttcagagatgggaatcggtgaggagcatctggaagagatgattgcggacgcccagaagacaaaaatctgggaacactgcccgaggcttacaacgccggaggatatgcgaagattatatctgaaaaccatgtacaggggaacacccaaagaaaaagaaataaaatagtgagagtaagggggtgagggtatgccaaagtataatagtcttagatctgccatcgaattattaaaaaaggttccgggccaatatatagaaaccgatgttccggtaaaaccccatgcggagatctccgggatctaccggtatgtaggggcaggggggaccgtcaaaaggcctacgaaacaaggcccggccctgatgttcaatcagatcacaggccatgaggatgcaagggtgctgattggcctcctggcatccagagaaagagtgggacttcttctcggggaaaagccggagcgtctcggctttcttttaaaggaagcggtagaacatcccatccagccggtggttatttcaaacgctgaggcggactgccaggaggtaaaacactttgccactgaggaagggttcgacatcagaaagatccttccggcgcctaccaatacgccggaggatgccggcccgtatatcaccatgggtatgtgctatgcatcggatgttgagacaggggaatcggatattaccatccacaggctctgtctgcagagcaaagacaccatttccatgtattttgttccgggcgccagacatctgggggctttccgggaaaaggcggaggctttgggcagacccctccctatatccatcagcattggggtggatcctgccattgaaatagccgcatgttttgagccgcccacaacgcctatcggattcaatgagctttccgtagcaggggctatcagaaattccgcggtgcggctgaccaactgtctcaccatagaagaaaaatgcattgccaatgcagaatatgttattgagggggaattgattccggactcctatatccgggaggatatcaataccaacacagggaaagccatgcctgaattcccgggatatacgggaaatgccaatcaggcggttccgcttatcaaagtaaaagcagtcactcacagggagaatcctattatgcagacctgcatcgggcccagcgaggagcatgtaaatatggcgggtatccccacagaggccagcatcatacagatggtagagcgggctatgcccggccgtcttcagaatgtgtattgctgttctgccggagggggtaaatatatggcggttctccagtttaagaagaggagccagagcgacgaaggccggcagagacaggccgccctgcttgcattctccgcattttcagaattaaagcatatttttattgtagatgaggatgtagatccctttgatatgaatgatgtattgtttgccatgaataccagataccagggggacattgacaccatcttcatccctggagtcagatgccatcccctggatccttcccagaagatggagtacaatctggcgctgcgggacaacggcatttcctgcaagatgatctttgactgtacggtgccgtatgcccagaaaaaacggtttgagagatccaagttcctggaggtggattacaggaaatggtgtccggagctataaacagctgacaacagaatcccatatgagaaggcggccttaggaaaccatccagggccgttttttcgcaaaaaaaggagtgaacgtgtgatgaatgccaaagaaaatatattgatggcctaccggcatgaagagcctttgtgggtacccagccagaccacggatcaggatacctgtcttcccacaatcgtgatggagggaccaaagggatacggcgttaccgtagatgccttcggcgtatcctggacctttgcagaggggatggagggtcctatggtgaccaggggaacaaaaagactggaggatattacggcgtggagggcgtatctgaagataccggatcccaaaagctatgactgggagagaggcgccagggaggataccgcacagtgggacagggagaataagcttagcagtgtgattataataaacggcctattcgagcagtttcacgctatgacaggggtggaggacgctctgtgcggccttctgatggaagaagaggcgtccgaagagctattgggagctctcacagactaccggatagaggaaataaaattaatcgctcaatactataaacccgataagatacagttccacgatgactacggatccaacgacagaatgtttatgtccctggaaacctggagaaacatgataaaaccccatttgaaacggattgtggacacggtacacagccagggcatgctgtacgaacaccattcctgcgggtacatagcccctcttattgaagattttatagagctggggatagacgccctgaaccctctgcagttatccaaccatccgtacgagctgaaacagaagtatggaaagcagatctgttttgtgggaggattcgataaccaggggattctggacagacagggcgcaggataccgggaacggtacgaggagtgcctataccgcatcggattaatggctccgggaggaagctgggtggcggaaccggctatgatcgatcctggcattaccggtcctctggtggacgccctgtatgagtataatgctcctttgtgggagaaagccggctattgtccccccgagaaaccaaagcagatgaccaggacggcttatactgcggcacatgaggacgggacaaaaaccgatttctgagggatttccgggattcattcccgcaaggaatagatctttcttgaaattcgaattgtaaaaacgaatgaaaatactataattaccttaaaagatatgcaaaatgcataaaaattttatataactatatgtaaatatagtaaaaatgtcgtaaaaaagaacggacaggcaagcagggaggaaaaggcctatgagcatatctaattttctgcatgtggggattacggtgcgggatattgaaagaaccattgcgttttatacaaaatattttgggtttcagctggagtatcaggatgtgttctcagaggaatttatcagtttgcacaatacgctgtaccagctgtcagatggagctttttcagatttttgcttcttaaagtccccggatgggattgtactggagctgtttcaatttcatcctcaaaaagaaggaaaagggacagtttggaaccagccgggctatacccatatctgtcttcgtgttcccgatatatttgaagcatatgaaactatgaaggcagacggggtttactttttcttccctccggacagaagagcaaccccggaggagcactgggcatttttaaaggatccggatgggaatttaattgaactgcaggactaaggagtgaaacttcggatgtattttatatgaaagcagtataaaacaggaaggagaaagagtatgaaaccattgcagattgcagaactgaggagtatctatgagatgctctctctgaaaggaaaggcagctcttgtgaccggaggggccggggggatcggaagatcctgtgcggccggactggcggaagcaggagcggatattgtattgatggatattccccagaaggcacagattctggatgagaattgcagagagatcgagaaacggtatggagtaaagactgggaaatgcatgggaaatgttgcaaacgaagcagatgtgaccagaatgatccaggagacagcagagctgtttggaaggctggatgttgtattctccaatgccggtgttgcgggacgcagcgacagtccttccggtattcccctggaggaatggaagcgtgtggtagatatcaaccttacgggaatgtttctggtaaaccggatcgccgcgaacaagatgaaagagctgggaaacggaggctctatcatcaatactgcttctatgtcagggcacatcatcaataaagggagcagaaaggatatgagccagcatatggccgtgtatgcagccacaaaggcaggtgtgattcagttcaccaagtctatggcggtcagctatgtggaggacggcatccggtgcaacagcatcagccccgggatgattctctccggtctgcacgatgatatggatatggctcctctgaaggaatttgtaagggatgcggttcctatgaaccggtttgcgtccctgaatgagattatgggaattgttgtatttctggcttccgagctgtcctcttatgcaacaggaagtgattttctcatagacggcggagtgaccatctggtaaaggaggggcagggatgaaagcagttatgctggtaaaggcatttaatgagagtaccaaagaactgggagaggtagcctgtatggaggtgccgaagccggagattgtaaacgatgacgaggttctgatcaaagtagcgtatgcctctgtgtgcggttccgatccccatctgctggagggatattttgagcttcccattccctcgccctgcggacacgagctttccggaaccatcgaggccctgggaccaaaggcaaaccgcaaagggctgaaggtgggggataaagtaaccggcaatttttaccggacctgcggttcctgtgactactgccttggaggggaatctcagttctgcgaacatgcggaaggcctgggggccgcccaggcggagtacattgtatggcatgaggatcaggtatataagctgccggaaggggtaagtcttttggacgcagcactgacagaaccctttaatattgcggtgcgggcagtggagctggcggacttccggctgggggcccatgtggctgtctccggcgggggcggcatcggccttatgatgacccagcttctgaaacggagcggtgcagggcgggtgaccgtgctggagcctatggagggaaagcgaaagagagcgttggagatgggcgccgattacgtgctcaatcctctggatccggatattgaagagcaggtgcaaaaaattacgggcaaaaaaggctttgatgcagtgattgagtcctccgggaacggacccgcggccagaaaaaccctggattttgccgccaggggcgcacatctggtattcatgtccatgtaccggcgggactatgaaatgtctatgaatctcctggagtatacctaccggaaggaactgagaatccagggaatgtatctggcccaggaatccttccccagggctgttaatatgcttccccagatgaattttaagcccgtggtggaaaagatatatgcattggatgagtgtaagcaggcttatgcggatcagaaatcagggaaatatgcaaagctggtttttgactgtaccaagtgagaaaggagcttttatgatagagtctttggaacatgcattttccctgaaggagaaagttgtcctgataaccggggggaataagggaattggaaaaggaatctccctggccatggcgcagagcggagccagcgttgcgattatgtgcagaaacctggcaagcgcagcagagaccatagaagagttagagcaattcggcggtgtccaccgggcctatgaaggggatgtgacaaaacaggaggatgctaaaagagtggttgccaaagtggttgaggactacggaagaattgatgtgctggtaaacaatgccgggattgccactccctttgatcccatggaagacacagatgatctgagcgggtggtaccgggtattggacgtagacttaaacggaacatttctcatgtgccattatgcagggctgaagatgaaggaacagaacggagggcggatcattaatatcacctccaattcttccaggattgtgaatatcccccagaaaagctgttcctacaacgcggccaaagcggccggggacaggctgaccaagtgcctggcctatgaatgggcgcagtatggaatacgggtaaatgcaattgctcccggatatacagagaccaatctggtaacgggagtgaaggatgagggagagacgaagggctggacggattactggcggtcctgcactcccaccgggcgttttggcaaacccattgaaatcggggctgcggctgtctatctggccagcgaggcggcagaacaggttacgggagcagtccttaccatagacggaggatatatgctggcgagataggaggtgcgctatgagcaattcagaaaactgggtagatatgcgcggcatctgcaagcggttcggcggagttgtggctctggacaacgtatctctcaaggtgagaaagggtgagattcacgcgctcatgggagaaaacggggccggtaaatccacaattatgaagattttggctggctccttggaaaaggatgaaggagaaatatatataggaggcaagcttgccaatataaaaagtcccaaggatggtatggcccatgggatctccattatctatcaggagctgatgctggtaaacgatcttacagtggcagagaatattttcatcgacagtctgaacaaagacagtaagattatcaattggaaggaacttcggaaaaaggctcaggaatatgtgaacgagacaggattttcggatataaaagcaacggatgaggtaggtgacttgacagtggcctatcagcaggtggtggaaatctgcaaagccctgtccaggaatgcttctgtgctgatactggacgagcctacttctgtactttccaacaatgaggtcgtgcacctgttccggctgctgcggaaactgcgggaggagggagtagccatcatctatatctcccaccggctggaagaggtcatggatctgtgcgacagaattacaattatgagggacggtacctacattgacacggtggagactacttccattacaaaacaggagctggctaataaaatggtaggcagagagcttcaggactactatcctaagcgggaggtccggatagggccggtaaacttcaaagtggaaaacatcagtgtcaggggaaaggttaaaaatgtttcttttgaggtccgccagggggaggtcctggggatcaatggtcttgtaggggccgggaggacagagaccatccgcgctgtcttcggagaggataaaagagattccggcaaaatctatctgaatggcaaagaagtaaccattcgaagtcccagagatgccatacacaacgggataggactgctgcctgaagacagaaaaacccagggagttctactggatcttccgatccgaaataacattactctgggatgcctgaagctttttaagacagctttcggtaaaatttcaggtaagaaggagacagcgtatatcaacgatatggtagagcagctgtctatcaaggtgggaagtatagaaaatgatgtgtccagcctgtccggcggaaatcagcagaaggtggcaattgccaagctattggcctcagactgtaaagtactgctgctggacgagcctaccaggggtgtggatgtaggtgcaaaaagagaaatctataaaattatcaatgattttgcggccaggaactattccattgtgatgatatcttccgagatgcaggaaattatgggaatgtgtgaccgggtgattatcatgagaggcggcgaggtcaccggggaattggataagaaagacttttcggaaagtaacctaatctcttactctatgggagtctaggcttctacaggattataaaagcggaggatgcgaatatgagcgaggcaaaagtagccaataaattcaactttaagaagttttttaaggaaaacaatgcgattatcatctttgttttactgattataattgccagctgcctgtcacccaattttctttcccagagaaacgttgtgaatgtactgaggcagcaggtgccgtatgccctggtggggatcgggtgcatgcttgtcattatgaccgggggcattgacctgtcctgcggtgcaattctgggggtgggaagtgtggtaatcgccctgcttctcacaaaggaaagcataacatcagttcccgcccttcttgggtgtgttgtgattactgccctggtgggcggagtcattggcctgctgaacggtgtgctggtggcgtattttaagatggcggcatttattgccaccctggcggttatgacgatggcccagggtctggcttacattctcacaaacggacagcccatccgtctgccgtccactcctgccacagatgcacttattgcatttgcggagattaaagatccccttctgggagttccggttgctgtatacgtaacgctggttgtaattctgctttttgtgtttttaataaaatggacttcctacgggcgtcttaccatagcgtccggcagcaatgagaccgcagtgcgcctgtccggtatcaatgtaaatctttacaaggcagcggcatataccatctgcggtgcgctcagtgcacttgccggtatctttgttacctgccgtgctgccatcggaactcctgctaccgtatccgggggatacgagctggatgcaattgctgccgtggttatcggcggtgcgaatctggaagggggaaaggcatcggttgtaaataccatcatcggtgtgctgatcatggcgttaataggaaatatcatgaatctgctgagtattgctgcttatcctcagaaggttgcaaagggtgtgatcatcattgcggctgttctcctgaaaagtataggaaacaaaaagcagtaacaaaaggagtgaaatgaattcactaataaaaaagcgtaaatgaaaggagaaggatttatgcagaaaaagaaagtaagaaaactattggcaatggcactgacagtggggatggtagcaggttccctggcaggctgcggggacaccaaggcaaactctgatgaggtgaaggaagaaccggcaacggaaacgaaggagccggaagcggaggaatccgatgccacggacgccagtgacaccaagacccaggacactgccgatacaggcgacttacatgagatctacaagcttacagagagaaatgcgctgagcggactggtatctcctgccatgaaggacagaaaggatattgacaaggcactgcctgcagagcaaaaaggaaatcttaccattggcttatctatgggacagatgggaagttctttctttacagagatgatcgacagtgcaacaaaagcggctgaggattatgggtatgagttggttatgctgtgtgcggacggcaatatttccaagcagagcgcagatgtggaatccatgattacagcgggatatgatgcgattatcctgaatcccatggacgtgacagcagcggcagcagatgtaaaaagagcggtggaagcaggaattccagtaatcggcgccggtgttgactttgcagaggacgtgccggtggttacttctatccttgccaacaactacttcgggggctgggaatccggactttatatgggggatttcttcaaagatcagcatattaaggcagccgcaattttgggtatgatgggacacaccattgatgagagccgtatcaacggcatgatcgcaggaatactgtacaaacgtgcggaacagcagggcaatccctactcctgccaggaagatgcatacctggaggcaaatgaactgttcagcgaactgagagacaaaggtaaattcagcagcgacaaatgggactttgaaattgttgcccagggccagggagactggaccaatgaaggcggacttgcagcagcagaagatatcatcgccggaaattctgacattaatttaattatggcggcctgtgatcccatgggcgccggggcaatcaaggcaatcaaaaatgcgggtcttactcccggcaaggatatctatgtagcctgcgccgcagacggaggaaaggaaatgttcccgtacctggagagcggagaaatgctggtaaccggatataacagcccgaacttaaacggttccgccgcagtggatctgattcatatgatgtttgaggaaggatacgatgcaagtaatcttcctgccgcatcggatcttccgaatggggctatcacaaaggaaaactggaaagagtatgaggatccggatctgcagtactgcaaggtacttccttttgagtggaaaaccattgatcagatcagagaagaggcacagagcaaatagtgtgctgaaatataggaaatgaattcttgggcaggaggtagcgtatctcctgcctaaagacaaaagggacttcgggtgaagtgtatggaaaaaatgaaatcagtatattttgcagcaaaggataagattgaagtccgggaagtggatatcccagaggtacgtcccggaatggttaagataaagacagcctatgccgctctttgtgccacagatgtgcatatggtgaccatgggagttctgggggctcagccggggattcctctggggcatgaggcgtcgggcgtgatcaccgaactgggagagggaaccggggattacggttaccggatcggggacaaggtggtggtggccccggtggcagtgtgcggaaagtgccctatgtgcaaaaaggggctgccccagtactgccttcaagcagcgccggtagcggcattcagtgaatatattgtcacagacatcagcgcagtatataagatacccgcggatgcagatctgaagaaatattccctggtggagccttccgtgtgcaccatacgcgccatggacctggcaggtatcaaacacggacagaccgtggcggtgtcggggatcggcggcataggttccatactgctgaatatggtgcttctcgcagggggcgccaggataacagccattgatcccgtgcctgagaagcgtcagctggcgctggacatgggcgcggagtatgcgctggatccctttcatgatgatttggagaagagaagcatggagattactgagggaaatgggtttgaccacgtatttgaagtgtcgggctcgccaaaggcggccaatgtatgccttgaccttgtggctcactgcggcaaagtaacatattttgcagtgtttccccctgcgtatgagatgcctctgaatctctataaactgtatatgaaggaggccagtattcagacagtatttaccagccattatctgttcccacgggcaattaacctcattcccaggatacagacggagaaaattatcggaaaggtaattcctctggcacaggcgctggatgcgtttgcattatttcaggagtccagatatcctaagattttactagaatgttaaacaggcagaattccagaagggaggaatatatatggccgacagacaagttgtaatgagtttaaaagaaaaagcgtatcagatgcgggtgaacctgctcactctgtgcggaacctttgagggcagcgtccacataggcggagatttgtctatgacagatatcatgattgccctataccactatgggctgcatgtggatccaaaggatattaagatgccgggacgggaccgctttattctcagtaagggacacggtgcggtaggaatgtatatcgctatggcgctgaaaggattttttgattttgatgagattctgaagacctacggccagctgaacagcgcatacggaatgcatccctgcaaggtcaatctgccaggggtggaaacctcttccgggtcactggggcacggactgcccattggatgcggcatggccttttccgcaaaggtaaaccaggaaaagcacagagtctttgttctcctgggcgacggggaatcccaggagggaaccacctgggaagcggcgctgaacgcccatcagtataaactgggaaacttggttgcatttgtagaccggaactgtcttcagctggatgatttcacagaggatatgatgaggatggaaccctatggggacaagtggaaggcatttggctggaatgtagtggaggtcgacggacacgatatggcccagctggtggatgccatggatcagctgccttctcccgagtcggatacccccacagttgttatctgccgtacggtaaaaggaaaaggcgtttcctttatggaaaataatcctgactggcatgcgggttctgtcagcgaggaggatatgaataaggcgcttgcagagattcgggcagcctgggataaagaaaggggtgagtaatatgggtgtaacgtttaattttggccaattcgcggcatccagaacgatctgcggagatactcttcaggaaatgggtgagagaaatcagaaaatctatgtgctgacagcggatttgatgcgtacctgcagtgtaaaaggatgcagaaaggcattcccggagagatttatcaatgcaggaattgcagagcagacgatgcttggcatggcagcgggacttgcccttgagggaaatattccctatgccactactatgtccacctttgcttccatgcgcgcctgtgaacagctccggacagatatctgttaccagaatcttccggtgcgcatcatagcgacaaacggggggcttacctccaccgggggctctacccataatgccatggaagatctgggaattgtacgctctatggcaaatatgactcttatcgttccgggggatccgggaattgtgagggatgtgctgctgtctaccgagaatcatcccggcccggtgtatatacgtctggccagaggaaaaggcgagcctgtggtataccagcccggagaagtaacctatcaggtggggaaagctatcgagacaaggcccggaaaggacgcggttatcatagcctgcggggttatggtagctcaggctgttgatgcggcgaattcactggaaaaagaagggatttctgtaagggtgctggatatgcataccctgaaacccattgatgaggaagccattgtgaaagcggcgcgggacaccggtgcgatcctgacactggaagaccattacaccattggcggcctgggaagcgctgtggcagaggtaattgcagataagaacctggactgcaggtttacccgtatgggtatcccccaggtattcccgggattcggcgatggaccggagctttatgacaaatacggattcggcctggagggaaccatcgcggcattgcgtgacatgataaaatagggggaaagagaatgagagaatttgacctgtttgtaaatggagagtggctctgtcctgaaagagaagcatggattgacaacgttaatcctgcaacgggagaagtcttctgccgggtgagcgcagcgggagaaaaagaggtagaagaggcccttcggggcgcctatgaagcccggaaagactggggacgttccctggccaaggaaagagaagccattctcttaaaagcagccgactgcctggaggaagacgcagagaagtatataccgtggctgatcgatgagagcggttcctccctcacaaagattaccgcagagatagccagctgtgccggacttatccggactgctgccggggaatgctgccgtatagcgggaggggtaatacagggggaatactccaatcacctctcctactacacaagaaatccgctgggggtggtggtgggaatcgccccgtttaattatcctttatttctggcaatcaacaaagtagcattcgccattgcaatgggaaatacttttattctgaaaccgtcgtcctacacgcccttatccggtcttgtgattgccaggtgctttgaaaaggccgggcttcccaaaggtgtgctcagcgtccttccggggtccggaagagtggtgggcgacgccctgaccgccgataaaagagtgcggatggttgcccttacaggttccagccaggtggggcagaggattgccgtgcaggccgcctcctccctgaaacgctactctctggaactgggagggaagaaccctatgttgatattaaaggatttcgatgtggataaagcggcggatattgctgtcttcggtggatatttccatcaggggcagatctgtatggccaccagcagaatcattgccgaggaacctgtctatgagaagttctgtgaagtgatggcggagaaaacgggcaagatcatcatgggagatccccacgatccggacacaatcgttggtcccctgattcacgaaaaacagtgccgggttttagaccgtctgatagaagatgcggtgagcaaaggggcaaagcttcttgccgggggaaagcacaggggcgctttttacgaaccaacacttttaaaggatgtcacccaagagatggatattttctatgaagaatgtttcggaccggtggtatgtgtaatctgcgcagaagatgcccggcatggggtggagctgtgcaatgataatgagtatggcctgtccagttctattctgaccaatgatatcacgctggccatctccctttctgaggagatagaggcggggatggtgcatattaatgaatctacagttgtgggatccacccgggcacccttcggaggcgtgaagatgagcggcgtagggcgggagaacagctcattttcagcggaggaatatacggaactgaaatgggttacggttcagcattaaagagagggggacagtgacagaacagcgtttacattttgttgtattttttatcttcttctctgtggtaaaatagccttaacttcaaaaacagaggagagacagagatgaaaaacaggattctggttgtggaagatgaaaaagcaatctcagatttgatctgtatgaacctggaggtggccggatatgaggcgctcccggtttacgaaggggatgccgcggagcaggtactgtggaatgagaaggatctggatctggcccttgtggacattatgctgcctggccggaacggatttgaattaatggaatgctttcaaaaaagagcaattcctgttatatatcttacggccatgtcggatgttgcttctaaagtaaaaggccttcgggagggagctgaggattatattgtaaaaccctttgaggtgctggaactcctggtgcgcatagaaaaggtccttgagaggaccggacggcagaaggaggtactcagtttcggagggattgtaattaacctggacagccatcaggtaagaaaggatggggagtgtgtcaccttgaaacccatggaatatgatctgctgttgctgctggtgaagaataagaatgtggcgtttaccagggagcagctgctgcagcaggtgtggggcagtgactatatgggagaaacccggactgtggatgtacatgtgggccagctgagaaagaaactgggtctgacggatcagataaagaccattcccaagctgggataccgcctggaggatagggaatgaagctttggaaaaagatatctatactaaccacaggcatacttctgctggccctggggatctgcgggagctttaccgtagtccggatgggcggctacagcatagagcagagggtgtttaatgagggcaagcagatggagggcgtgggatacgcctttgaacagttctgcaaatccaatgaactcctggacatgagcgacacagtaaaagcatcttttctggactttcagttcaggaagtgctgcgggaaggattatgctctgatacaaaatgggaagcctgtgataaatctcacagagtttcaggtgtctgatacagggcttctggacaagcttaggccctggaacagcgaacatccggattatgagattcaaaaactgaatcacagatatattcttcttatggccaggcccgtggagggtatggaagagacgtatattctgaccgcaaaggatattacccaggtttttacggggatcgaaaaccaggctgtactgttcgggggcgtctatctgctggtgtcatttctggcggcagccggtattggcattctgaccaggtttgccctgaggcctctgtacaatctggagaaggcatcccttgccatcagccgggggcaatatcaggagcgggtgcccgtagcttccagggatgaaatacaggtggtgggagaggcttttaatcagatggcagaccaggtggaaacacagattacccagctgcaggagattacagaaaaacagaagatgcttttgggcagtctgacccacgaattaaagacgcccatgacttccattatggggtatgcggatacgctgctccatgtaaagctgcaggaggagcaaagagagaaggccctctcctatatttaccaggaatgctgccgtctggaacggctgtccggaaagatgatgagcctcacgggactctatgtaaatgatacgattcatctgaagcttggctctgtggaggaattgtttcaaaaggttgcccatgtggagaaggaacacctccgggagaaggagatacagttttccatggactgccggatggagaagatccccatggacagcgatctcatggagagcctgctggtaaaccttgtggacaatgctatcaaagcttccagaccgggaggaagcatctggatggaggcaaaggatcacaaaatcgaggtgatcgatgaggggaggggaattcccccggacgaggtttcaaaggtaacagaggctttctatatggttgacaaggccagaactaaaaaagagggcgggattggactggggcttgccctgtgtaaagaaattgcccatatccacaaggccagtcttgagatcgagagctctcccggctgcggtacggtagcccgaattctttttacagacgcttacaatttatttacaacttcctgaatactttgaatgttcttgctggtatgctgggatgagaaaggaggaagtgtatgagcagcaggtgtatgaaaaagtttctggcaggagccgcgggagcgggaattcttgtgacagggcttctgggatgttaccagacaaccagtcagatgacggttacagagaaaaaacaaaatgaggcacagggaggtgcccaaagccaaaacgcagcggaggaaaaggggcagaatacatctacagtggaagggcaggtacaggccccggagaggtatcaggcttcttttgagaccaatgaggggatgtttcgggttgaggcggatgcggatatccgggtgccggaagccgagaagatggagataaggcctgtaaaatcaggaaatatcagtcaggaggatctggaccgagtcacaggggtgctctttcagggacagccgctgatgcagtatcaggacgaaaaacaggcgggagagatgacccaagaggagtgtgagcgatatatccggcaactggaggcgttgagggacaaagtggattccggagtgagggagcgtctggacacagagatagaagcgtaccggaagagaggtgagaaggcaccggcatctgtaaagatgaaggaggttcccatcaaggtgccggaacctgcagacggggccagcctggagggatttgttaccatcggggagaaggaatatgaatttcaaatggtaacagtcaacgatgagggagaggtgcttcagaagataggcttttatgacaggacagccaggtgcgcccagtactttacggagtcccgggtctctgaacaggagggagatttttccatggaaactccgtcagagacaatcattggggagggcaatgcccttttggaacagctgggatatgaaggttttgccctggcacaattggagtatcagaaggcagccagcccttaccttgaggagaaagatgcggaaactgggctggtccttcactataccagggaaattgaccagattccgattctgtattatcgggaggcgggcaaatatgcaacctccctgactctgagggaagacaggaagagtgacggagggattggattaggggagggaaactcccccatccagaagatctggcagccggaggagatttccatcctctacaccgatgagggacttcggcgggttttgattaaaaatctttatatcgttgaggcaggagccggtgaggcggtctatctgctgcccttccaggagataactgacgtgtttcagcgtatgataggagagaaatataaaagctatcaggaacagaatattaaagcctctgcgcaggtacagcagataaaactcgggtatgtaagaactgcggaggatgcggatgaccaggaaggaagactggtccccgcatggattttttacgggaatatggagacagtgtacccggaggagggagagtatcttttatcccaggcaagctttcacagtgcggctcaggcccttctgattatcaatgccatggacggtacggtaatcgatgccccgtgacagccattatataaaaagggcctcccggcgggctgacgatttatattgaatttctggcatgatattgtataatatccatagataggacagaatgacagcataccacagagcgggggtattatgagccagaagggaaatactacagaagaggcgttagggtacagtctgaagaagctgatccttaggatgccttttgaaaagattacaatccgggatatcacagaggaagcggggctgatgcgtcctaccttctataatcactttaaggataagtatgaccttttagagtgggtttttacagaagagataatacagccggcggaagctctgattgagagcaatatgatggaggaggctgtccatctgatgctgaggcggatggagatggatcttgatttttacaggaaggccgtacggattcaggggcagaattcatttcaggatataattttccaggcattccgggatattatgaggaaggtactggagagcaaaatgaagggaaagcgcatggccaaccgtcttcttacgccggaatctatagctgagtattatgcggcggtcagttcctttgtgataatgcggtggattaagactgagtgggaggtaacgacacaggaggttgcccaggcgtacgccatgctggtggcagatcctctggatgagatgattcgggagctgtaaagctgcgcatgacaaatagtcgaatttgtcattaaaaagcgacaaaataatgttgttgtcattataaagaaaacattgtaaagagattgaatattaacatattcagtctctttttttataataaaagaaagaaataatactattgtccggaaagaggtggtgtgaggtggggacagttgtagtgtggctccttgccctgggattggccctgcatatattcgagaccactatggagataggagccacccaggaaaactggggaaaaaagaaggctctggtcatgggggttgtgtatgcaggagtacaactgcttctgatggcccttgggggactggctgcctgtgtgctggaaaagcttcctgccgtatatatcattggcagagcctgtcattatacagcagttttgctgcttttgatgattgccgtgcgccggttccggaacgggacggacaaggcaggctttctggagcgcagggaggctcctctgtctgtgaagggatgtatcctgaggtctgtgagaaccgggatggaggcagttattataggagtctgcctctactacgggaacggcggcgccctatggggcggtatctgtgtattaggcctgtctgttcccggagctgtgggtggatttctgtacggatattggcggggggtaaaacaaaagaagatgatatgccttacggacgcagtatttatgacactggcagcgtttgggcttttggtgtagggaaggagggaaaaaatatgacagtaacaagaaaaatggaacgggcagcagtgggaaagacaatcgacgaagtactaaaatatgtgaacagggacagagagaagcacctcttgaatctggtagacctggtagagaagctggcgggagacatgtttcaggaaaagacctatgcgggggcaagaaccctcattcggcagccggaaggaaagtggatgcagtatgttaactgtcttctggacgaagtagatccccacgtactcaggacgactgtgctgaatctgggatacgaagcggcctttcgggggacaaagatcatacgaaggatgagaaaggaacaccagtgcaatattccctgggttatgcttctggatcccaccagtgcatgcaaccttcactgtacagggtgctgggccgctgaatacgggcataagctgaatctgtcctatgagcttatagacagcataattacccagggcaaagagctgggggtttacttctacatgtatactgggggagagcctctggtgagaaaaaaggatttgatccgcctgtgtgagaagcacaacgactgtgcatttcacgcatttaccaacggaacgctggtggacgatgacttctgccaagagatggctagagtggggaacttgtccctgtctctgagcctggaggggttcgaggaggtaaatgacggtcggagagggaatggaatctttcagaaggtgctgacggccatggatctgctcaaaaagtacggcctgatattcggcacttccatctgttataccagcgctaacaccgagactgtcacctcagatgaattcctggatttgatcattgagcatggctgccgctacagctggtactttaattatatgcctgtagggaatgaggcggtaaaggaactgattcccacggtgaaacaaagagaatatatgtaccacagaatccgtgagatcagaggcagagaagggggcaaaccaatctttgtcatggatttccagaatgacggagaatttgtaggaggctgtattgccgggggcaggaactacctgcatatcaatgccaacggagatgtagaaccttgtgtatttgttcattactccagcgccaatataaaagaggtttctcttctggaggctctgaagcagccgctgtttatggcctacagggaaaaccagccctttaacgggaatcatctccggccctgcccgatgctggagaacccggagatccttcagaggatggtgcacgaaaccggggccaggtctaccgatctgcagtcgccggagactgtggaacacctctgcggcaagtgcgtggaatatgccagcgaatggggggcaaaggctgacgaattgtgggaggaaaatcctcaccacagagaatatttccagaactataaggaaacctataaataaaaatacaggctttggacgggaaggggtggacggctgattattatgtgccctttttggtaagcataggatttgccctgcggcttaaaacggactgaactgctcctgttggaattcccagacttttgtggtaagataaaaacagcatagattagaaagagggcatgtatcaatgggacagctggttgattttaccatggagagagaggggcttgtgaaaccaggggacaggattgaattaaaagaggatagagcaagtaccatgtccgggctgatgtattattataccattaaggatgcggttgcaatgtcggggaatttgagaaaaccccttgtgaagctgaccggtacggttacccaggtggttccggagaccagtgtgtatatggtaaccgtagagattgacgatgagtaaagaaaaaaggtcccaggtgccggagaacaggcggaggatgcacagaaagtgcattctctttttttgtttgcggcagaatgtgatatattatatagatgcaaaataatgcgaaaatgtgaggggattttatattgcttgcaaataaaaaacaaatctgatatattagaaagataaaaatatagtgagcagaaaggagaaggaacatatggtgagtacagaagaaaaactgagacgccacaaggcgttctgggcggcagagaaggggaataagcctttggtaattgtgcggattggggacttatttttgagcagaaggtttgaggctatgcttcctctgctggagcgggggcatgaaatcacaccggaacagattgtggttgaagactttttgccggattatgaacgtatgtatctggaggcgaattctgttaatcaggatggattctttgcggcggagccctgtacaggattgccgtggatggaagctatctttggggccagagtagttggagaatcggttagtgtgattacaaggcctgtggtcggagaactgagtaacataaagggtatagaggacaaaggaaaaaaccagtggtaccagaaatacctggaattttcggcaaaactgacggcgtttgccaagggacgttttccggtgtgtcagcctattctgcgaggcgtgactgacactgtaggagccttaataggacaatcagagatggcctatgcgctggtggatgaaccggaaaaagttaaagcggcattttttcagattgcggaagcgctcagaatgcttatcagggatcagtataagactacaatctcttttttcgggggcaggagcataggattttatcatatatgggctcccgggagtgtgatctggtaccaggaagatctggcttccctgatgtctccggcgcattatcaggagtatctgtatcagacttcctgcagaattgttgaggattatgagtattcgctggtacatcttcatccagccagctttttgcatctggacgggattctgcaggtggctaatctaaaagcagtccagctgaataaagatttgacaggtccttccgtggaagaaatgctgccccagtgcaaagcggtattggtaggggggaagaaccttgttctgggcatggggccgtttacaaagaaggatattgacgtaatctatgaagaactgcctcatgaacggacggcgctcaacatactggctgacagcgtggaagaggccaatgaaataatcggatatatagactcgaaagactggtaatgtgaaatattacataaataaaaagagatagaaaattgtacagtattactgaaaaaacagtgaaaatatctgttaaaatggacattgactcatagttaaaaatgtattatattggaattggtgatatatcagacgcgaataaatcactacaggagatgtaatatgacatcaaaggaaagagtaatggcggcattaaatcatgaggaagccgacagagtgccgctggatattggcgggattaataattctaccatgcatgaacagattgagaaggcattgaaagaaaaactgggtctgaaagacaatggaactgtcataaaggcggtccagcagggcgttgttgttccggatgacagtgtggtggagtattttggaggtgatacgtgttccctgtacattaatgaatcccgcccctggaaggataacggggacggcacctttacggacatgtggggggtggggcagaagctgaatccagatgggtattattataatatgtgttttcatcccatggagcatgtggaggagccggaggatctggaagcttacaccttcctgccgcctacagagtacatggtagagggtctggcagagagagcggaggctcacaaggacaagtgctgcattctggaggggctgcgggagcctatgttcggccttccctcctggctgagaggaaatcagaattattacatggatctgcttgccaatgaagaactctcggacgccctccacgagaagatactggcgtattatctggagctgattgattttattatggtacgcataggggataaggttgacattgtaaaagtggcggatgatttgggggcgcaggatgcgctgctgatgtccccggagacgtacagagccagggtgaaaccttaccaggagcggctttacagctatataaagaaaaagtataacaaaaagctgctgctccattgctgcggggcgattgaacctattatcggcgatctcatagagattggtgtggatgccctgaatccggtgcagatatcggctagaggcatggaaccggagatgctgaagaagaagtatggaaacaatatcaccttctggggtggtggcgtggatacacagagctgcctgaacctggggacagcagaagaggtaaaagaacaggtgaaaacaaatctggaaatttttaagcctggaggcggctatgttttttcccaggtgcataatattcagccgggtgtacccctggagaatatcctggctatgtatgaggtttttagagagaattctcagtataagtaaaatggaatggaaatggtgtgcagatgggctgctgcctgaagacaatctgtcttcaggcagcagctcattgttttttgaaagaaaagcctatacatataataattggataatattggtgtgatatattataaaaacaaaggaaaaggcaaaaaacatgtaaatgatatatagaaaaaatgcacaataaaaataagaaataactattaatatataacaaaatgcggcaaaaaacggaaaaagctgagaaatattattgacacaccgcggggagcgtattatgatgtagttgcgtctgatatattagaaaaacacataaatataaggaaatttcggcaggtattctgtttgtttcctttgggaatcagaagaaaaggagagcttatatgaaaacaaagattttaagtctttttatggcggcagtgttagctgcaggtatgttggccggatgcggaaaaagttctgatgacaattctgcaggaacagagtcagatgcatcagatacagaaaaagaaacagataaaaagtcagatggagagccggtggtattgaagattgcaacaattcttaccagcggtgaaccggcggtaaatcaaatggaggcatttgcagagcgtgtgaacgagaggtctcagggttccctggaagtacaggtatatgccaattctgagctttattcaaatgcacaggatatcgtagaggcgattaccagaggcggtaatatcattggatttttcgatcctgcccagatgtctgattttgtaccggactatgcggttatgaatgctccgtatttgtacaatgctccggaggatatagagaaagtgggattgtccgactatgggcaggagatggtggctcaggcagccgaaaaaggagtccgggttctggacagcatgactacatatttcggaaccagacaggtgattagcaaaaagaaatttaccaacccggaagagtttaagggcattatgtgccgtgtgccgaccacccctctttgggtaaagaccattgaagctatgggaggaaaccccacgaccatagctttcagcgaagtctacagtgcaatttcccagggagtggccgatgcggctgaaaaccctcttcccagtatctatgcagccaaacttcatgaagtggctccttacgtaatgctcaccggccatatgattgctccgggcggactggagatgtctgaagagttcttccagagtctgacagaggagcagcagaccatactaacagaagaggcccttgcatttgcgaaaggaacaacagaagaagtgttagaagcagaaaaacaggtaagaaaagagatggatgaacagggagttgaatttgtagaagtagatacagcggcgtttgctgaggcatgtaaatctgtgtatacagcatttcctgaatggacagacggcgtatatgacagggtgaaagagattgtggacaaagagtaaccaggggtgaaacacctgtatgttcggcggccgggcagccatgtctggccgtcattaaaattagaaagaaggagattcaagatgcagaaaaactttaaaatttttttggctaatctggaagagtttatcgcaggtttctttctcattctgctgattgtactgaccagcgctaacgtcatattacgtctggtatcaggaaagtccctgccctgggcagaggagctctcttatgccagctacgcctgggtagtgtttgtgggggcgagtgcggcatttaaaagaaaaggacacagcagtattgatttactggttcagctctttccaaagaagatggagaaaggggtagcggtattaaccacagtagttgagatgacagctatcgtgggcattgcctatctggcagtgaatctctccgctgccgctgtgaccaagcttactccgattctccatatctcatatacctatgtggatttgtctgttgtatttggcttttttatgatgcttcttcattgcatcaagcagatatataatatttttaaatatgaagattataacagcaggcctctgtatgccagccttatcaatatagatccggtacaggatatgacagatgagattacagcttcacagggaaaggaggggcagtagaagatggcatttttacctctgatattaatgtttatactttttgcgattaatgtgccggttgctttttctcttgcaatatcgggcatggtatattttatctttttaacaaatgatcttcccatggacttactgatacaggcaattatgagcagtaccacatcctaccccatgctggcaattcctttctttataacagcaggtgttgtaatgtcctatgccgggatttccaagaaattaatggatatggccgaagtactgaccggacacatgcagggcggcctgggacaggtaaatattcttctgagtgttttcatgggcgggatctcaggctcacctattgcggactgcgcctttgaagcaaaggttttggttccggagatggaaaagaaagggtattccaaagcattttcgtctgcattgacagcggcatcttctgtgattacaccgattattccccctggcatatgtctgattctgtacgctacggtaaccaaccagtccataggcgatatgtttatggccggctatattcccgggattctcatgggggtggcgctgatgatcacagtatggagaatttccaaaaagcgaggttatctgccgtcaagaaaggccaaagcatcctggaaagagataggaaaacaggcaaaaagttctgtatgggccctcattatgccttttggcatcattatggggctcaggatgggatggtttacccccacagaatgcggagccatctgtgtgctttactccgtatttttgggaatcttcatatacagggaattaaaaataaaacatattccaaggattttaatagagtcagtactcagtacggcatcggttatgtttatcatgtgttgtgcgggcttattttccaaatatctgaactgggagcagattccctctacggtatcaaacttcctgctggggcttacagacaataagtatatatttctgctgattgtaaatgctttgctgctgtttatgggaatgttttttgatgccaatgccgcactggtgatctttcctcccctgttggcgccggttgcccaaaagctgggaattgatctggtgcagtttggaattatcatgtgcatgaacattaccatcggcggagtgacacctccatttggcattctcatgttcaccgctgctaatataacaaaggtaaaggtgggagaatttatcagggaggcgctgcctctgctgggagccctgattgcagttttgcttcttgtaacctatataccagggatctcgctgtttttaatcagactgttgggataggaggaagatacatgtctcggtactatgaagaagttccggttttgggtgacagaaaaatgatagaagaggctgctggaggatatctgcaaaaagaaggatttcaagcgctgggagaagacggcctttggggaaagctttatagtatcacgggaggcccgcattttattcagctgactataggcgaagggcgggtggctgtccaggcctggataaaaattgcactgctgcccagactctggatcggtgaaatggggattaaaggcatgtacgggttccttgcaaaacggcagatgagacgccgcctggaggaactgaaaaaagtaatgaaaggtgtatagcataaatggaaaaattgcagttccgtatagatacgggaaacggttcaagagagctgattttggatagtaaaaatttcttatattatgcagctcagaagctggaaaaaagtctggtgcctgaggaaaaggtgatcgaagcagccattgaccggcctctgggaggggtatctcttgaggatatccccatagacggaaaagtagctgtcatcatagacgatgccaccagacccaccccctcccggaagatcattccgtatcttctgcgaagggtggaaaagagaagccaaaatattacatttataacagctcccggaacgcacaggcctctgacggaggaagagctggataaaaagatcggaaaagatgtgctcaaaaaatacagtgtggtcaatgtggacgcacagagagaagaagattaccagtacatcggtgagacggaacagatgaaaactcctttatatatccacaaagccgtcctggaagcagactatctgatagccatcggcaatatcgcaccccataatgtggtgggctggggcggaggcgccaagattattcagccaggggtcagtggcaggatcacaacggaggccacccatctgtcaggctgctttgagcggatcgaggaagtatttggaaatgtaaactgtaaggcaaggcaggaaattgatgccatcggagaaaaagtgggactgaattttattgtgaatacagttttaagcgctgaggggcagattctgggcttattctgcggtcattatctaaaggcccacagggaaggtgtggcttttgcccaaaaagtcctgtgcccctccattccggagttggcggatattgtgattgtctctgcatacccctgttatctggactactggcagggattcaaacccgtagggttttccctgaagggagtaaagaagggggggattgtgatttatttgtttgatcctccggaaggcctatgcgggaattcccctgcccataagccaattttggagcaatatctgaataaggatgagaaaacggccagaaaggatattgaaaatggaaccatccaggatctggtggggatctgcaatcctctctgccattatcaggtggtggaacaggtgaaggtattctgtgttacagatactctgacagaggaagagtgccggctgctgagatttaaaagatttaccgatgtgcagaaggcagtggccgatgccttaaaggttatggggcaggatgcgaaaataggagtcattccctgcggtggagagaccctggtgcgggtggagcaagagtgagaagtttgccgtgcaaggatggacgtgagaaagattatatggtaaattaatgaaagaaagaagttgattactggaggggtcgtatgaacgttggtgctagaagagatggggaaagtcatgcagagtatgcataccgtataatgcgtacaaatatactggatctgactatgaagcctggaactgtaattaatgagggagatatcgcggaacagctggctgtaagcaggacaccggttcatgaagcggttctgaaactgaaagaggaattcttaattgacataaggcccaggaaagaatccaaggtatcctatattgatattgatatggtgaacgaaggcttctttataagaagaaacctggaaccggctgccatgaaagctgctatgaagcacatcggcccggaatacaggaaaaggctgatggagaatctgaggacacaaaaggagatcattgaggagggaagactggaggagttcctcacatgtgatgatgaattccacgagattatttatattgctgcgaataagcctcttaccttcagtgtagtacagcggatggggtcccacctcacccgtatgcgttacctgattcagatttttaactgctatgattttatacctgtaagcttccgggagcatgaacagatgtacgagatgctcacttttggaactgcgtcggatttcagtattgatgattatgtgatacagcatatcaaaggattccaggattatctgccgaagattgtaaatgaatacagagattattttaaatatttgtagagaaaaagcgtcgctcagggaccggggatatggttgtgggcggcgtttttactttcttttatatattgcggctgcctacacagacaacagagagcaataatatggcataattatcagatgcaaagaaaagcaatatcgattatacttatgataggctttatctgtctgcatatattgcgtgagcatcgcatatcaaaaattgctttgaagtgattaacagctccctctctggaggtacataaaatgctgccatatatactgatagtattagtattctggtttttattctactatgccattgcgttagaatattttcgtgtcattaacatttacccaaaagaaaagtgtatgaatattggaaataagcggtggagttgttatccgtatacgaaaagaaatacatatagggaaatacccgctgaagttatctgggggaatagatttatggctgcgttaacagtgataacgctctttttactcctggtgaaagaagacagtaaggttacattagtagaaaactatattctcttattaggtgctatatatctcatttgtatgctaagcatgaattaccgggcttttatacacgtatgtaagaggatgactataaaaacgttgaatatatggttaactaataaagaattaattcaaaaggaatggatagcaatagatttggtttctgtgtataaaagaaacaatagaactttggctgaggtaaaaataaaagataatgatatagttctcagagatgtcatattagacagtgttaacccggaagatttgcaaaataatgaattcacggtaaaagaaatgggaggggtatgctgggttgagctggaaaggggcaaagagtattgctatatagaagatattgcagatgcgatcgtagaacaggaggaagatgtctcttactatttaaacatagtggaattttctctgactccctattttcataattatgatagtatagcgctgggaaataaaaatatgattcaattacccagggtgagtaaatgctggacagtagatgaacattttgaagccctgtgcaaaattgccgagaaatggtgccgcgcaaacaatatcccttatcagtacaaagagatggaccagataatgtctatactttgagaattatgccgcccatcacctgccctttgaaagcggcagccggatgtgtccggcgttcttccgtcaaaagacagcaaggcaaggagacaacagactatagacaatcccatgggtaattcgctataatgggaatagttagtaaaaagggtttggttatggaacgttgaagaaatacaaaggaggatcctatgaaagagacagaagaaagaagcaaagggccgaaagctgtaagctggagattggcggcagctgtgatttttggaagcctgctgttttcaaccacagctatggcagcggagggagacggggaactatgggtcaatggacagaatatcctggaggcggaacaaaacacggtgccctgcggggcaggtactgcagtatacgatgcatccagacatgtgcttacattgaacagtgcagtcatagaaacgggaaatgaggacggcaatggcatctctgtgaaatatgaaggggagacacccgcagatctgacgattcagcttgcagggaacagccggattcaggcggggaaggaagcccaaattacaggcggtatattttctccgggcggtattaccgttcaggggaacggagctttgagtattgaggctgagaacggcatctatactgcagaagacttgcgcttaaagggaggcagcatcacggtgaaaaccaaagagccggcccttcaggcggaacaggatataggaattgaaggggtatctgtcgcagcacactcctcagaaaatatgggaatctgtgcagggggtacgatctcggttaaatccggcagtgtgtctgccaaaggaggatcagggatgccaggtgtggctgcaaggcagacacaggggacagagggagaggaacctgaacttcagattgtcctggattccggatatgcagagagaaacggcggtgaagccgcagttacagactggttccaggaggaggaagagacggctgcctggtcctcctttgtcaatcccggagagaagggaaagctttccccggattttggcaacgctatgaatgaggtcagaattgagaaaaagggcagctggatcaaagacagaatcggctggtggtatcagttccaggataagtcatatcctgtgaatcagtggaaatacattgacagacagtggtactattttaacggttcaggctatatggccacgggctggctgaaaaagggcaatacctggtactatctgaagccgagcggagccatggctacgggctggtgcaaggtgggtaatacctggtactatctgaaggacagtggggctatggcaaaaggctgggtactcttggataatacctggtattatctgcggggggacggagccatggctacgggctggttactgaccggcggcaaatggtattatctgaagtccgacggaagcatggctgtgggatggctgaaattaggcagcctctggtattatctggaggacagcggggctatggccaccggctggagacttcttgaggatgagtggtactatctgaagtccaacggaagtatggctgtgaactggtgcaaggtaggaaatacctggtactatctgagatctgacggaagaatggccacgggctggctgaagctggggaagacctggtattatctgaaggacagcggagcgatggtaaccggtctgtatcaggtggcaggaaaaaattatgtgtttgataccagcggggcaatgaagactggatgggcaaaaaccaataatatctggtattatctgaagagcgacggagcagtttataccggttggctgagagatggaaatactacctattatctgaaggaagacggggccatggccaccggctggtttcagacagaagatgagtggtattatgccgacagcagcggtgccatggcggtgaaccggtggatcggtaattattatgtaggaagcacaggcgccatgcacacctcgggctatacaccagatggctattatgtggatgcagacggcatgtggatgcctctctcagaggatgatatgaagacagacggtgaccggatggtaacgaaatattactatttcacattgcctgagacatggaataaccggatggagtattttgttggaagaggactgtgggcgttcctgtatgcagatactgtcatggatggcaaccaaaagaagcaggaagagctgtttaccattgaggcggtaaggacggagcaggaagcgagagaatacgcagcggaaatggaagacggaagatatctgggccagcactccggactttggtttattgcgggcggtgatgaaaacacagtgattgatctgtacaccaaggcacagcaggcggagattcagcagatgcataaagatgtggaaagtattttagattccctggtcttcagataataaggaaaatggagaaacagcaggacaagcttgggtggatgtcctgctgtttctttgtctggaatttatgatgatgtactgaaattctataaaatgcacaaattatgtataaaaaagtaaaaaatatgatgcattttttacatatatcttatataatagaatctagtagtgtgagttttcttgtacagtataaaatgacgatatagagcataaatcataaaagaaactgaggaggggatgagtggaaaaggtcggaaggtcttggtttatgctgttatataaaaaacaaggagatgaaggaggaaaatgatgagcaaccggagtaaggaaaaagcaaaaagaacattcttagagaaatggctggcggcgatagctgtcctgataggaatggcagtactgccggcaacggtaagtgcggcagagccagataaggtactgtgggtaaatgggcagaacatattggaggcagaagataatacagtattgtgcggcgagggcactgctaaatatgatcctgcaagcgggatccttacgttggaagacgctgtgattaatacaggagaagcgaatggctatggtatctatgcggaggatacttcaggcgaaccgatgaacctgagtatacgtctgaacgggacaaatgagatacaggcagatctgggagaagctgctatttcaggaatgattgtcccgggaagtatagatattgagggagagggctctctctacctgaatacagagtatggaatgtacgtagaaggggaacttttgctgacagatgcacatctcacagtaaacagcgtagatgaagctatagtagctgagaaggatattattgttaaaggaaaaggaagcactctcaatgttgggtcagcggaagcgacaggtatagctaccaggggatcttttagactggaagccgggagaatgtatgtaaaagcagaaggaactatgccagcgctgcttgttgtacggtataaagagtctgcggacgcggaaccgtctgccaataccatatacctggcggaaggatatagcgagataaatggaggcagaattgaatctacagaatggcttgaggatggagatgcaagagttgcaggtgtatcttttgcagctcccgatgtcagcggcaaacttgctgatgatttatccaacgccatgaaagagattagcattgagaagcagacaactcctccggtgaagactggcgggtggaaagagaataagacaggctggtggtatctatattcagacggcacctatcctgtgaaccaatgggatctcattgacaacaaatggtactatttcaatggttcgggctacatggtaacgggctggctgaaactgggaaatacctggtattatctgaagagtgacggctctatggccaccggctggtacctggcaggcggaaagtggtattattccgacaacagcggagccatgcagacgggctggctgaaactggggaatacctggtactatctgcggggtgacggttccatggccaccggctggtatatggcaggaggaaagtggtattattctgacaacagcggagcgatgaagaccggatggctgaagcagggcagcacctggtattacttgaaagcagacggctccatggccaccggctggtatcaggatggaaagacctggtactattccaacggaagcggagtgatgcagacaggctggataaaatcgggaaatacctggtattatctgaaggcaaacggagcgatgcagacgggctggctgaagcagggcaagatctggtattacttgaaagcagacggctctatggccaccggctggtatcaggatggaaagacctggtattattctaacggaagcggagggatgcagacaggctggctgaaacagggaaacacctggtattatctgaagagcagcggagccatggctgtgggctggtgtcaggtgggaagcacctggtattattttaaagaaagcggagctatggctaccgggtggataaaggacgggaatgcctggtattatctcaacccgtcaggagcaatggccgccaaccgttggattggcaattactacgtaggtgcaagcggagcaatgtatgtatccagatataccccggacggttattatgtggacagcgacggtgtatggatgaaattaggtgatgacgatatagacttcgatttagaccgggtagtgacaaaatatttttatatgacagtaccggaaacatgggatgagccggtacagtatggagctatagagaagatgtggattgccatgtatgctaccgcctttaaaaatgaaagcggagaggatgactatgagccgctttttggtgttgtggcagcaaagacaaagcaggaagcagagctgtatatggcagaattgaagaatccgaaaaatctgggacagcattccggcatgtggttcgtagccggacaggataaggagagtgcgattggctcttacagaccggagcagcaggcagagatcctgaaactgcagggggatattccgggaatcctgaactctatcgtattcagataagcagaagaaaaggcagatatcatatggtatctgcctttttcaggccgcaggccaaagtgctcttcagccgatagccatatcatttacctttgcaatttttatgtattcagccaggattccaatgaactgactgttggttggcttgtcttttatagtgctgcgggtcagccggcagtaccgctccttgtgcccgcttctccagacaatctgtatagcatggcggatagagcgttccacgctgccggtggttgtgtgatactcgtctgcgatctcagggtacaatttcttggtgattcccaccagaaggctgggatctttcattacctggagaactgcatgtttgatataatagtaacccttcagattaggtgaaagccccagatgattcagcaaaagagtgagattgttggagacgctttcatcctctggacaagcctccgcaggagacggtattgctgctgcctggcctatctgcagtagtcctgacaacaattggtttacttttccattttcgtcagttaaactaacattataaattttgtcatccgaaaatacgatttgcagagttttcatttccattatagtgttcctccatcttattcttggcggtttgtgtacaaccttgggataccgcatatggtaaattatagagaagagcagcgattaatgtcaattcacgcaatatgtataaaaataccaaatatggaagggctgatatattgaaaagggaaaagattaaaaaaatttgcagagaccgggggtataccttggaggaattggcaaaaataagcaaaattcctctgagtacattggcgaaaataagcagcggggataccccggatcccaggtttgaaactatgcagtccattgcctctgccctccggtgctccatggatgagttctctgaccgggaacccaaaattccttatcagtacgaggaatacgtatataagatgaagcagctggcgccacatgtgaaggaatatattaagtttattatagatttggaatatgaccgcatgatctatctgaaaacggaggataagatccggctcagatgttttgagttcaccaacgtagtggacgggctgggggaatatgagagcaagatagaaaaaatgattgtagcagacaacaattcctttaccagggattgtactttttgcgtgcacatctgcgacaatgctctggagcctcagtttttcagagggtcttttctgggattccggtatgaagatggagttatgcctaagcagggggagatttggatgtttctgaaggaggggtatctctatattggcaggtactatcactataaagagaaacatttattaaaatctctcaacggcaacatagacgatatggtaattactaaaaaactagactgcaagagaatggggaaatttataggtgtcattaaaaatgaagtttccatagagtatcttccctgcccccggcttattaagggcagggagggtgagactcatatagatgaccggctgtgagtgttccggtattcttttgcactgcatcctgcaattttattaaaatatgcggaaaaatatttgtaatccttatatcccacctgttccgctatctcataatatttgagatctgtgccgcacaccagatcctgggccttttgaatacggagtctgtggatatactctttaaaggaatagcctgtttccgctttaaagatgcggctcagatagcctggggagaggtaggcggctcccgccgcgtcctcaagatggatatcttccgtgtaatgctgatgtatatagtgcagtgcaggcgcaatctgggaatgggcagggtgttccgttttggaaggaagggcaaggcttgcaatgagatccatgatctcccggggggtttccagttcttccatcagcgcatttatcttcagaatatctgcggtatcctctgagacagctcccagcaggactgccagccgtttgaccgattccaaaaacagcagacgggagcatttatgctcttccatgtaggaataataggtatgaagctgctgctggatctttccggagtccctggaaagtatagctgttataagctgactttcataggtgtagggctgtatctccgggtcagaagaaaaacgctgttccggggtgagcagtgtatagggctgcccggtgttccaaaagcagtgttccagcgcctgggtgagtaccgtgtagaccagggggaattcttctggggaagtaatatccctcattacaacgatggaattgccaaaggtgaccggaagaataccggggagaatatcgtccatggcattccggtccaaagggtattcttctgtattcagaataacaatggcatggtgatcccgaataaaaaaggcaaagggctgaaagcgcagaaaatgctggatcagactgccaagaaccagcttctcatcggtactgtccgtgcggatcagggccagtgcataggaagaggcaaagagctccaggcctattttgccggccttttttgcaaagtaggaataggaaacctgattctgcagaaaccgggagagcagggtgcccttaatcagatggcggttttcttcatagatatctttgagctgagaaactttatgggagctggcctgggccgcctctacttcttttttgactttaatcacagattccaggatctttttgctgtctgcactctttaaaaggaaggcgcttaccttgacatcgatggcactggtaagattctcggtatttccgtaagcagtgagaattactacccgggtttccggcagcagttccctgagccgctgagcgagctccagaccgtccataaggggcatctggatatctgccaggacaatgtcgggccggaggcgcaccgcaagctgcagggcttcctcaccgttgccggcttctcctatgacttccattccattgtcttcccagggaatggcatagcgcatgccgtgccggataaaatcttcatcatctgcaatcaatatctttatcatatcgtactttcctttggctgcgtgattttaaatacactgcattccttttctacataatattccataggataagcttccccgtatttcagacggaggcgctccctgatatttttcagggcgagccctttctgtgaatctgtggggtcggccaggatggcactgatctcatccggacagatcaattcgccggtattggctacctcatatataatattgccgttttcctcatagacagtgacccgtacaaagccgtggaggctgtttttcaggccgtgaaccaatgcgttttccaccaaaggctgcagaagaaaacagagaacatattcatccaggagattctccggacaggtctggaagaactgaaccttgtttccgtagcgaatctgctgaatcgtgatataacaggaaagatgttctaactcctgtgccaggggaatcttatcgtttgtcttgggcgagagggtcagacgcatcattttcgacatattggaaaccatggtgcttacattttgggtatctcccatctgggccatccaatagatggtgtccagtgtattatagagaaaatgggggttgatctgggtctgaagcatatcaagctgggattgctttaattttaattctcccatgtaaacctctttatagagaaattcgagcttctcagccatctcattgaaatgatgagagaggaccgagatttcatctgtcccctttaccggtacccgtacagaaaagtcttcattggacagggaggccatgcgtcttcccagcatatccatgggcttggtgatgatcttggcaaaagccagtgacagcagaatggaaaatgcgaataccaggacagacagaatcatcatgttggagagaaaggtctttttcaccactgtgaggacgtccggcctggtaatgctgtatataataagatccgtatgctctatggagtaggccgagagaatccggttgcttataatcttactgttttccccggaagcagccagctgggacagcttttgatacgaaagctcctctttgggaaattctgactgctgactggtatctgactcgaccagacatccgttgtccggggagagaagaaaataggaggtttgatcatccttctggttttccagaatagcagcctttatcttagcacagctgatggagagcttgatatagccgatgtgctgggagatattgctgggattctttaacagccgggtgagatatagatatccgttcttctctctggcagcggaataatcccagctgggggatgcgttctgttctttggcagctgccgcatcctcattggtgagacggatattagatcccaccccaatcatatccggcaccatgttagccagcgtaatgccgtggatgcccgaggagaacccgtagggcatagacaggagaatatcgctggcattttttttgtctttcagataagatggactggaggggggctctgtgagaaaggttctcaggttttgctccatgaggggatacagagttaagtccagggcatcgctgaagaacacatcaatattcttccccacttcattgatgttggcagcatagagattcttgagatccttctgggcgctttttataaacaggttactggcaacaatatatataataagaatgggaatcgctacaaggcagaggaaaaacagaataattttcttccgcatcgtcattttaactttcatagtcatactccttatggcagattgttctctggttggatcttatcatcagaagacaaagagtgtcaatgaaatagggggagaatccccaaggagataattttttgggatactggtaaataacttaggatgtttttgccccagagaggctgaaagacccttaatcggtcattttaacaggatatcaaaaacaataacttcggttttttctttataccggggccgatataatgaatctaacaaaaacgaattggaggtattgggaatgaaaaggaaaatgaaagctgctgcgcttttgatggcagggatacttacggtaactggactgactgcctgcggcggcggggatgacgcaaaagcggagggcaaaaaagggacaggagacggaatcgaacttacggtatcacattattacctgcaggaagaacgggagagcaatgcagtgggtgacagctatctggccatggtggagcagtatgagaaggaccacccggatatcacagtaacccagcaggccatgtctcagtccgattattcaacaaagattcaggcacaggccgctgtgaacgaggtgccggatgtgtttatggtaaaaggctcctgggtagataattttgtggaaaacggaattgtggcccctattaacgagtatctggacaaatacgaatataaagataacttcagagagggtgtatttgacgcagccaccagggacggccagatctacggtatgcccaaccagatgtccataacctctgtggtttactacaacgaggcactgtggaaatccataggatacgattccttcccggataattgggacgacatctacgctgcggcagaaaagttccaggaacagggtatttcagccattgctctgggcaacagcgagaaatgggcggcggaatcctgcatcctgtctaccttaggtgaccgttttacaggaaccgactggacaaacagtatcatcgacaattccgggacagcaaagtttacagatgattcctttgtatcagcacttgagagactgcagacactggccacgaaaaatgtactgaatcctgattttaacaccataacagagacccagggggttgagtattattcccagggcagggcagcagcagttgtctccggacactggagcgtagctgcaattgaatcctttgccgatgaggagaccattaagaatacaaaggtcgctgttctcccgtcagaggatggaagtaagccggaaagcatctccgggggatgcggatggtattttgcagtgaacaaaaacctcacaggggaaaagctggatgcggctatggactttatcttctctaccacaggatatgagatgtgtgaatatgcagccaaagaacacgggcttatgggagccggtcttgtagaggatgtggatgtctctgcatttcctcagctgacccaggactttatcgcactcaccaatgaactgaattttactccggtatacgatctggttatggacggagctgtcatcgaggtgatgaatacaggaatacaggatctgctgaatggttcaaaggaaccgaaggatctggcggcagagattcaggcggagcaggataaattaaaataatggctaaaacagaggcggaacttctgtccgcagaagatccgtctctatttttgcccaaaattggaaaggtgtgagtgtatgagcagttgtttaaaagtaaaaaagcggactatattcctctatatgcttcccggtattctctggtacagctttattattttggttccggtatgccttgccgcctactacggaatgttcgactgggcaggaggaacgaataagacttttctgggaatccagaattatctggacgttatcaaggacccggttttccgccagtctctggggaataatatttatcttaccatagtctgtctggcagggcagataggaattgcctttatcctggcagtgatgctgaacggacggcacataaagtttaaagggtttcaccgcaccatgagttacttcccggcggttctttccgctgttgtcatcggttttatctggaatatgatctatgattaccactatggacttttgaactcttttctgaaggtaatcggtcagggggatctggctcaggcatggctgaataatgataagctggtgcttctgctggtggcgattccgctgatctggcagtatgtgggatattacctgctgattatcatgtcagccctatcttccgtggatcctcagatctttgagatggcagaaattgacggtgcaagcggctttaaaagggctatttatatcacgcttccgctgattaagaatacactgattgtctgcgttaccctctgtatcgcgggcaacatgaagatttttgatcatatttatgctatgacaggaggcggacctggtacatccagcagtgttatggccatgtatgcctataagacatcttttatgtcgtataagatgggatacggcagcgctatgtccattatcatactgattgtcagcctgattctggtggcgggaagccggggactgcttttgcggttcgggaaggataaggaggtttaggatgaaagaagcaggaagaaagattttaagaattataccaaatgttgtgctgatactattttccttgtcttgtatctttccggcgatatggctgttctactcctcgctgaaggataaggcggaattttaccagagccccattgcactgccaaagagcccgaattttcagcattacatctctatatttaccaacagcaagattcttacttggatgggaaacaccatacgaaacagttttctttccctggtatttatcctgctcatcggattcgtggtaggctacttcctctccagatacaagttcagagggagaaaggcgctctatggatatttcctggtggggatgctggtgccggttcacgctctgatggtaccgatgtatgttctttttacgaagatgggtctgacggacaactggtttacgctggtgcttccgtacacagccctttcgctgcccatagctatttttctggtggaaagctatgtgaaatcgattcccctggaagtggaggaggcggcggccattgacgggagttcccttcacagaaccctgttttccattatcctgcccatgtgcaagcctatcttagtgacagtgggcatcatacagtttttctatgtatggaatgaatttacattttccctgattttgattgattcagaaaagtggatgaccgttcctgtgggtattaccctctttaaaggtcagtttaccacagattaccctaagatgatgaccgctatgctgatcgcaattttaccggctgtggttctgtatttctcattctccaaacagattattaagggaatgattgcaggcgcggttaagggataagacataagtttcagataataagaaaagaagaggtggatacagaatgaaaaaattgtgtttaaatgagaactggcagcttcacgaggcccctttaaaatgggggaaggaatacaaaagccagatagaccgccagacagacggctggtatgactgcagtctgccggcagatgtgagaatgcctttgattgaggcgggggttattaaagatcctgtactttccgactactgcagagagtctgagtggatagaagaccgctcctggtggttccggaagacattcgacggaagcgctgtatgcatggaggatgatatcgttgaactggtcctggagggactggataccagaagcgatatctttataaacggacagtttatcggctgccacagaaatgtgcactacccctttgtgtacgatgttaaggagcttctggtgccgggagaaaacgagattatggtgagagtcaccagcggtctggaagaagtggcagaggaggatctggcagagcttgaccatgcagtctgcctggagagtaataacgggggtgaattccggggggacggccggcgttcctttgtgaggcggcctcagtatactgtaggctgggactggggacctaaagtaatcaccataggaatcaccggaaacgtctgcctgagaagttataagaccattgccatccgcgaggtacacttacataccgaaaagctgggggaaactgcccgggtacacgccatggtaaatatagaggatctgtgtttcatcagttccaaaagctgtgatgtaacggttcagatggtgagagagggagcggtatgcgcggaggctaaattggaaaaacagcttctcacctcaggatataactatctggatctggagctggaagttaagaatccctgtctgtggtggcccaacggatatggggagcagcctctgtatgaagtgcgggtatgcgctgcctgcggccgggatgtggaggaataccctgccttctcctttggcatccgtaccatacagctggataccagtgtgatttccggggaggacagaaatttcattctggttgtcaatggaaaacccatttactgcaagggcggcaactgggtgccaaatgattttatctatgcaagagtaccggatgaaaagtaccatgtgctcacagacgaggcggcagaggccaactttaatatgatccgggtatggggcggaggcctgtatgagagagacctcttctatgaattatgtgatcaaaaaggactccttttgtggcatgattttatgtttgcctgttctacttatccggatcaccggcaatggttccgggacgaaatgcgccaggagctggactatcagaccaagagactgagaaaccactgctgtatggggttatactgcggcaccaatgaggtacactggatctttaattccattgacaatcccagatggggaatagaattttcatatgagcaccagtatggactcagaattgccaatcttatggctaaggagattatacgaaacaattgcccgcagattccttactggaacagctcaccctacggaggggagcttcccaatgatgataccgttggagatgttcaccgctggcacaatgctctcatgagcaaaaagatggaagagcgtatcgaggcaaaggattacgacactatagaatcaaagtttgtgagcgaatacggctttatcggaccatgctgcaggaaaagcacagaagaatatatggatggagcttccatggacagggaaggaaatatctggcacatgcattccaatgtatttgaaaagggaaccgtaaatgcagcaattgagaaaaattatctggatcacccggagacattgtccctggacgattacattctctacggcggaatggtacatggattaatgtacggatattcactggaggctatccgcttcaaagaacactgcggcggcggtttgttctggatgtacaatgatgcctggggagaagtgggctggactattatagactattacctgagaagaaagattcctttttatgcggtaaaacgggctctcgcccatcagaaatttactatgcgggcagcagacgggcagctggtactgcagggggccaatgactatccggaggatctggaggtttccggaaagctaggctacgtctcctttgacggaaaggtgaaggagctcagagacatcgtacttaaagttcctgcaggagagaggacatatcttctgaaggaaaagcttcctgaaagagattatactgccggtacggtaatgctctatacagacagtgatgccattgacaatatatggctgcgcaccgatgacatgcgtcagctgaacttcggacccaaccctgtgagaactgtggaggtacgccaggagggtgaggataaactggttacagttaccgccgacggctttgtacacggggtttatgcggagggagattacgattgctccgactgctatttcgatctgcttcccggggaggtaaaaaccttcagaatcaagggaattggcgggaaggaacctgtcatcaaacaggtaaaataaaggataactatgcaggaggtatagaatgcgcaaagaatgttatgaagaagccaggaaaaaggcgctggaattttatgaaaaggctgcaattgttttgacggaagaagaaaaggctgcaattgaaatcgcagacttcggactggaggatctggaacacattgggctgattttggtcacttttgtgaatacggacagatgctgtgcaaaggaaatggttctctttcccggccagacttgtccggaacactgccatggacccatacccgagctgcactatgagggaaaagaggaaacattccgctgccggtacggaagcgtgtacctgtatgtggaaggggaagagactgccaatccccttggaaagaaaccggagggatatgaggacacctacaccgtcggacatgagattgtactccgtgccggagaacagtatactcttgttcccaacacaaagcactggtttcaggccggcccggagggtgcggtaatctctgagttcagtacaaagagcctggatgaatatgatgttttcacagatccgaagattaaccgtacccctgtgattgaataaccggcacaataggaaaggtgagactatgaaagtatcagtattaacagatataaaaaaggttgaagagcaggagcgggatattcccgttatccgcagggatgaagttttaatcaaggttttacactgcggagtctgcggttcggacgttcactattatgagcatggacgcatcggagatttcgtggtggaaaagcctatgattctgggacatgaatgcggcggagaagttgtggaagtgggcgatggggtaaaaggcctggagaagggggatctggtggctgtggagccgggatatccctgcgggaaatgtgagttttgcaagaccggaaggtatcatctctgcccggatgtggtattcctggccacacctccgtatgacggcgcctttgcagaatatatcagatatcctgcagatatggtttacaggcttcctgatactatggataccatagagggggcgctgattgagcctttgtgcgtggggctccacgccgcagaacagtcagagggaaaagtaggccagacagctgctattttaggcagcggctgtattggactatgcaccttgatggcattgaaagctatgggaatctgcagcgtatatgtggtggatgttatagaaaagcgcctgcagatggcaaaagaactgggagcgtctgcagtgattcacgggagagaacagaatgccgaagaagcaattatggaacttacccggggaaaaggtgtagatctggtatttgagacagcaggcacagagttcaccacaaaacagaccgcaaagctggtcaaaagaggaggaaccgtggtgttggtaggcatggcagccaatcccgttttcccatatgactttggaacgctgatgagcaaggaggctaagctgcacacagtattccgatataaaaatctgtaccccacagccatcgagctggtgagcagcgggataattccggtgaaaaaaattgtcaccgatacctatgaattttcccggattggggacgcgttggaggatagtattcacaggaaagaagagatggtgaaggcggttattaggatgtagtatttggcagggactattgcatggtttgtgatggttcctgctttttatatacttgggatttaacttactaagcttgagactgcccagtcggaaggtatggggtggcaaggggacggtgagagaaatcccgcggcggcgggctggctggttcggacaggagggaggcttaagttccgcggacacctccgtcgcgaagagagtctaagacaaaaccggaatccccgccggagcaccgttcgtatgtgcaaagaatgcttgatgtgcattctctgcccatgctcactttttttcgg

SEQ ID NO: 275 - DNA, 8416 bp, Lactonifactor FBI02339
  source 1..8416: mol_type = genomic DNA
cccggactgccgaaaaaatctcctgcgggaatcccggttttgcctaagactctctactcactcctgcggaatcgtccccggaacttaagccctccccccgcccgaaccagccagcccaccgccccagaattcctctcacctgggtatggggaagttccaggagggagagatttttggcaatttatccaaaacattaagtcgccaatagtgagaaacaggaggaagagtgtacaactcccgaccttccccacccagtacccctggccccaagacctcctcccttgaccgtcaatctgcgacactctccccaaaaaaccttcatggaatcccccgcctccctcctaaaggaaaaaaaactttgcttataccatgaataatggtataatatacgaagtatggaaaaaagtaaaaagttgtataggtagagacaatggagaaaaaagtaaagattaaaggacaattaaagacttatctacagtggccggctatattgacagttttgctgttgattatgaatattgccctttatgtggtaaacaaacaggctggggcattggccagtatttttcttgcagtctatattctgattgtggcgatactgtatttttacaatcgtcccgtccttatgagtgagctgatatcctttgctacccagtatgggcaggtgcagaagaacctgctggaggaatttctgctgccttatgcgctgatggattcccaggggaagctgctttggatgaatcatgagttttctcagatgacagggaaaagcaagaagtatcataaatcaattacatcaatatttgaggacataacggccgatgcccttcccagggaggaagagcgcactcagctgtgttttcagtttgagaaaaaagacttcagggcttctatgacaaaggtatctatggcagagctgtttgaaggttctgatatgatggaggctcagggggagaattatctggttgccttatacctttttgatgagacggagataaaccgttatatccgggagaatgaggaagaaaagcttgttgtaggacttttatatctggataattacgatgaggcgctggacagtgtggaggaagtaaggcgttcattgcttacagccttaattgaccgtaagttaaataaatactttggtgaattggacgggcttgtgaaaaagctggagaaggataaatattttctggttatgcggaatcggtctctgatggagcttgaaaaaaggagatttgatattctggaggatgtcaaaactgtcaatataggaaatgatatggccgtgacgatcagtatcgggatcggaattaattccggcagttatgctcagaattacgaatattccaggattgccattgacctggctctgggccggggcggagatcaggtggttataaaagacggcaaccagatttcgtatttcggtggcaaatcccagcagatgggcaagagcaccagggtaaaggccagggtaaaagctcatgcgctgaaagaatttatgagcagcaaggataaggttgttgtcatgggacacaagatcagcgatgtggattcattcggcgcaggtgtgggaatctaccgtgcggctaagtcactgaataaacgggcccatattgtggtcaacaatccgactatgtctatccggccgctgatgcagagcttcctgaataatccggattatgatgagaacatgtttatcaacagctatgaggcaaaagagattgtggacaataacacagtcgtggttgtggtagatacgaataaaccaagctatacagagtgtgacgatttactccatatgactaaaaccattgtggtactggatcaccacaggcagggcagtgaagtaatccagaatgcagtgctttcatacattgagccctatgcgtcatcagcctgtgagatggtagcggagattctgcagtacttttccgatgatatccgcatccgcaatgtggaggcggacagcctgtatgcgggcattatgattgacacgaataatttcctggcaaaaaccggggtgaggacgtttgaggccgccgcctttttgaggcgatgcggggcagatgttactagagtgagaaagatgttccgtgacgatatggaatcctataaagcccgggcagaggctgtgcggcatacggagaattacagggagtgctatgcgatctcagtgtgccccagtgaaggactggacagccctacggtggtagcggctcaggcggccaatgagctgctgaatattgtcagtgtcaaggcttcctttgtgctgacggaatataacgatcagatttatatcagtgcaagagccatcgatgaggtgaatgtacagttgattatggaacggctgggcggaggcggacacattaacattgcaggcgcacagcttaagaacatcaccctggatgaggcggttgcactattaaagaaaacaattgatgaaatgctggaagaaggagatatttaaatgaaagtgattttaacagaagacgtaaagtccctgggaaaaaagggagagattgtaaatgtaagtgacgggtatgccagaaatatgctgttcccaaagaagctcggggtagaagccaacgctaagaatatcaatgacctgaagcttcagaaggcacatgaagataaggttgcgaaagaacagctggaggctgcagaggcatacaaaaaagagctggaagaaaaagaagtagtactgtccattaaagtaggagagggcggaaagctttttggttctgtatctacaaaggaaattgcagaggcggcaaaggagcagcttggatatgagattgacaaaaagaagatgcagcttccaagtcctataaaagtattgggcacaactatggttcctatccgcctgcaccctaaggtaacggcagaattgaaggttatcgtaagagaagcttaaggaggctacatggaagaagcgctcattaagagaatcctgccccacagcgtggaggcggagcagtcggtaatcggctctatgatcatgagccgggatgccattatggcagcgtctgagatgctgactggggaagacttttatcagcaccagtatggtgtgatttttgatgctatggtggagctgtttaatgagaataaaccggtggacttggtcacccttcaggatcgcctgaaggaaaaaaatgtgccgcctgagataagcagtatggagtttgtgcgggagttggtcacagcagtgcccacttccgctaatattaaatattatgccggaatagtcagtgataaagctatgctccgcaggctaattaaagtaaatgaagagattgccaatgaatgctatctgggacaggaaaagacagaggtaattctggaagagacagagaaaaagatttttgacctggtacagcgaagaagcagcggtgactatgttcctatcaggcaggtagtgctgaatgctattgaaaaaatagaaaaatcgtcccgacagaagggtgcggtaaccggcatccccactggttttgtggatttggattataaaatgtcagggtttcagccctcagatttgattttgattgccgcccgcccgtctatgggtaagacggcctttactttgaatattgcccaatatatggccttccggcaggatgttaccacagcgatcttcagtctggagatgtcaaaggagcagctggtgaatcgtctgctctccctggaatctaaggtggattcccagagcatccgtacaggtaacctggaggatgaagagtggtcaaagctgattgaaggcgccggtatcatcggcgggtctcatatgatcattgacgatacccccggtatttctattgcggagcttcggtcaaagtgcaggaagtacaagttagagcacaatctgggaattatctttattgattaccttcagctaatgacaggcagcggccggaccgattcccgtcaacaggagatttctgatatctcgcgttccctgaagtccctggccagagagctgaacgtaccggtggtggcgctgtctcagctgagccgcgccgtggagcagcggccggatcacagaccaatgctgtctgacctccgtgaatcaggggcaattgaacaggatgcggacgtggttatgttcatctaccgggatgattactataacaaggatacagaggacaagaacattgcagaaattattatagcaaaacagagaaacggccccattgggacagtaaatctggtatggcttcctaattataccaagtttgttaacatgaagaagtagacgcagaatatgtcgagcgaaattcattgcatttccctttcattttgttataattaaccttaaggattagtcaggttaaaccttaggggcaattctaatcacaatttcatagggaaggggtcagtatatgagtgacaccaagtatctgatttctgaggcagcgaagctggcagaagtagaatctcatgtattacggtactgggaggaggaattaaagcttcctattggcagaaatgagatggggcatcgatactacacccgatgggatattcaggtatttctgagtattaaggaactaaagaaaaagggacattcactaaaagagattaaggagatggttcctttactttataaaaatgcaccgaaggaaagttttcaggcacctgtacagaagcaggcagctgcatccgggccttcgaggaagtcaaaaagggcaagagcccaggaagcggttaggaaagaaaaatcagagtcagacaagccggcgccgaagcaggacaagcctgaagaaacgtctgtgaaggcatctcaggagaaacaggcacctaaaaaagagataccggaaagtttttacaagattttggaaaagcttgtctcttccggcttaaaagagaaccatccggaggaagcccgctacaaagagctggacaagacgatccgtactcaccaggaatccagacgtctgattgcggctacgattcaacaaacgaagaaagaaaagaaaaaaaggaagttttcaaaaaagagatagacagatagctgttgagtgacgatgctcaatggctatttttttacaaaaagtactgcaaatgccctgttttacatgatataattcatactatggagaacgaaaagttatatatcaatgtgaaacaaaatatatgtgacggtatttaccggggaatttacaaagacggagacaagattcctccggaacggacactctctgataatttgaaggtaagccgggtaacggttagaaaggccctggagattatggagcagggcagattgattgtgcgtgaggtaggaaacggaaccagagtacagctgcataattacggatgggccagagagttggaagttttggtacttgtggcacctgcaggacatgcacagttttctgttttcattgaacaatttcagaggtgcgcagccgccggcgggtctttgctcctttatctggaaaggcttaaaaaggacaccatagaggattgcttataccgtctgtatcaaagaggtctctgtgatgtggctgtctggccccatggcatttctctggaacaggaaaagttggaacgccttagggctctggggatgaacatggtcttttttgacacagatacaggttttccctttggcgactgcgtatattcagacatagaagccggtatggtggctatgtgttccagcgttaggaagaaaaagaaccggagacttggatacataggattggataccaatcaatcgtacagtgcacgtcaggcgaaggaagctttcatgaaagtgggagcaccaggaaaagttctgtttgagctgccgcagaagagagaaaaccatcctcaaattataaaaaaagagttggaacgcctggaaaggaagggcaaactgccggatgcaatcatttgtccggacggaaaagatgctgttcttctggctaaaagacttcttaaaatgaaggcggcaaatattaaagtagcttcttttgaggaactagcggattccgcaagatttgggattactacatatgaaaaggacttccgtgagatcgcgaagacgctttatgaatgtctgtcagggcagagccggaagggggaactgtggaaagccaagaggtatttggttagtggaagtttaactgagagataaatggggaaccagcgcaatgcgcttcgcctttcccggattcctatcccagagaacttaagagaggggattcgggcatttcgggactgcagctggatataaaaacagaggactagacattaagcctaatcctctgttatgtttgtaaaatatattagccttctacaatagcgtctgtagggcaagcttctgcacatgttccgcagtctacgcaaacatcagcgtcgattacatatttgtcatcgccctggctgattgcttctgtaggacattcgccttcgcatgttccgcagcttacacattcgtctgtaattacgtatgccatatgtattatcctccttatccctcattttcgttaaaacttagattagtttctagagtcattttaaactatttagtattagaatacaagtataaatttctaaacaattggtaaaggaaatccatggaaatcgtaaagaaaacgggatgttgccaaaagtggttgaatatcatctaaaatggtattataatgataggacaaaaccaatgaaggaggaaatgaccaatgcagatcacaaaagaaatgacaattggacagctgatccagcttgatgaaaatattgttccgattcttatgagagcaggaatgcactgtatcgggtgcccgtccgcacagggtgaatctctggcagaggcggccatggtacacggcattgacgcagatacattagagagtcagatcaatgattttttggcaaacaaataaatttataaaagctgttttttaaggccgggaacatttcccggtcttatttcatgcataaagctgtccggcatatgcaaaaacagggccccagaggaaagttctgggacccttagctattttataaatgatagagtttttggagtgcatctctggaaagtatacaatctccgtgttccactaggtatgcctcgcctccggatgtgaaagacctgccctttccatactccgagagaatattgcatatcttattgaaatcttccggcgaatggccggactgatgaataatcagaacataattcccggtacgctgatcctgatagagtgaattatctcctttatagaaatgattcagaccatgagaggcggctattaccagatcgatgttggaaaactgatattcccgtaccagattaattggtacttcaggggcagccttggcatcggatttggaggctttctttttattcagcgctttggatttggcttcataaatcttctggaagatatccaggatatcgtccgcgccttcaaattctacaggactctcttccgaacctccattctctaaaaatggggcaaatttggaaaatctggtatccagttcctccggatcttctactttggttatgattaaaattatgctgtcaggtgtaacaggtattgcttctatcatcagagggatgttgtcagcctcaaaaccaaattcgaaattagcctgctgcatcatatcacgaaacagagtctttgccttttctgtcccataggccagttcactcaaatgaatctgacggtcttccaggtctgcctgggtaagagtgcagcgaatctggttatcgttgattttttctatcttcattataatcacatcctatctattaatctatattaaaaaccgtaaaaagttctggtcttccttttatattatatactaccaagtgtgtttatgtaaagaattttggagagttttcgtaaaaatggaaaattgggatttaacttcctaagcttgagactttttcagtcggaaggtatggggtggcggggggacggtgagagaaatcccgcggcagcgggctggctggctgggttgggcgggagggaggcttaagttccggggacacctccgtcgcgaagagagtctaagacaaaaccggaatccccgccggagcaccgttcgaatggtcaaagaatgctttatgtgcattctctgcccatgctcactttttttcggcctggactgccgaaaaaatctccagcgtgaatcccggttttgcctaagactctctactcactcctgcggaatcgtccccggaacttaagcctccctcccgcccaacccagccagcccgccgccgcaggattcctctcacctgggtatggggaagttccagggggatctatttatccaaaacatcgagtcataaatagtgggaaacaagaggaaaagtgtacaacgttcgaccttacccacccgttttccgtgaatgtgaagtgagtctctgccaggtcaagggaggaggtcttggggccaggggtactgtgtggat

SEQ ID NO: 276 - DNA, 1583 bp, Lactonifactor FBI02339
  source 1..1583: mol_type = genomic DNA
ctcagactgtagacaaattggttttgggctttgtatcccagagccagttttcttttattaaccaaattgcgttccaaataaagtttgtgtaaggggcttctccctctagaagcccccatttctctttcatcctggccagctttttcagattcatgcacgcaaatgtaagcccgaccttcatttccattcgggcttttccaaacatctgtgtatatcggaaaccatgattctcctttgcacttccaaagattcgttctatggtttctttcctttgggaatataattctttcatacccacggtttggcggatctcctcacacatctccatgtaaggttcccatatgtggcgcataaccgtctttacatgatctttgctttgggtacattttgcaagataggcacagcttgcacagctacttccacagcttttgtactcccgatatccctcacggttggttgttcgataggtcagcacctgattgttgggacagatatagcagtcgtaatactcatcataaacgtactcgtatttcttgaagaaaccctcttttgtcagggggcgtttgtatggcagaagcggtttgactccttgatcgatcaaaagttttgctataccgggagttttatatcctgcatcgcctatcagcgtctctattccgatcccttttatcttgtcatataaggacttgaaggttctgctgtcatgattgttcccgggatgaacgctatagctgagaatccatccattcttatcacatgcggtctgtactgcataagcaaatacatgtttatgttctcctttgcggaaccatccgctttccggatcagaagtgcttgctttcactgtcttttcttctttgccgccggctccaccggatggtgtattgctgtcatcctctttttctttcagcggacgtttcccgtgtgcttcacggtcttcattgatttcctgtttcagcagatcttcaaaaaataatgcctcatcatgagcaatacgcttctgcatctttttattgtttgctctggcttttacatgggtggcatccacaaaaacttcagtagggtctaccagcttaaatttgtagcattcagaaaggatatgctcgaatatctgttcaaagaggtcggtgtctttaaagcgtctcgtatagttctttccaaaggttgaaaaatgcggcactttatccagcatatccaacccgaggaaccagcggtaggcgacatttacctcaatctcttttaccgtctggcgcatgcttttaatgccataaagatattggatgaaaggaatcttgatcagcatgacggggtccatactggggcgtccgttgtcctgactgtatttttcttctaccagttcataaatgaaggaccagtcgattgctttgtcgatgatccgcagcagatggttctgtggaaccatgtcatccatgcaaaacaactgaatctgttctctttttttatccgcattctgtgtcatcataagcatctcaccgcctgtatttgatacatctattataccaaaaaagagcctcaaagtcttgtaagtgctgacttttctggctcaatggcgaagaaaatcc

SEQ ID NO: 277 - DNA, 174 bp, Lactonifactor FBI02339
  source 1..174: mol_type = genomic DNA
ctgcgcagactacggagtgcgtccgaagatccactgccggcggtcacttaggagcgaaggctttcctgagcttcttagtgaacggccaggcagttagctgaggagaaacgcagcagcaagcagatccacacagtacccctggccccaagacctcctcccttgaccgtccgtctg
